(19) United States
(12) Patent Application Publication
(10) Pub. No.: US 2003/0215809 A1
(43) Pub. Date: Nov. 20, 2003

(54) Regulated breast cancer genes

(76) Inventors: Zairen Sun, Rockville, MD (US); Xuan Li, Silver Spring, MD (US); Gilbert Jay, North Bethesda, MD (US)

Correspondence Address: ORIGENE TECHNOLOGIES, INCORPORATED, 6 TAFT COURT, SUITE 100, ROCKVILLE, MD, 20850, US

(21) Appl. No.: 10/144,194

(22) Filed: May 14, 2002

(51) Int. Cl. C12Q 1/68; G06F 19/00; G01N 33/48; G01N 33/50; C07H 21/04; A61K 48/00; A61K 38/17; C07K 14/47

(52) U.S. Cl. 435/6; 435/69.1; 435/320.1; 435/325; 530/350; 536/23.2; 514/12; 514/44; 702/20

(57) ABSTRACT

The present invention relates to all facets of novel polynucleotides, the polypeptides they encode, antibodies and specific binding partners thereto, and their applications to research, diagnosis, drug discovery, therapy, clinical medicine, forensic science and medicine, etc. The polynucleotides are differentially-regulated in breast and are therefore useful in variety of ways, including, but not limited to, as molecular markers, as drug targets, and for detecting, diagnosing, staging, monitoring, prognosticating, preventing or treating, determining predisposition to, etc., diseases and conditions, to breast.

### DESCRIPTION OF THE DRAWINGS

[0001] FIGS. 1-20 show amino acid sequence alignments between polypeptides of the present invention, and polypeptides listed in public databases. SEQ ID NOS for the polypeptides of the present invention are listed in Table 3. Others are as follows: NP_{—}065728 (SEQ ID NO 93); XM_{—}046054 (SEQ ID NO 94); XM_{—}108902 (SEQ ID NO 95); NM_{—}015046 (SEQ ID NO 96); XM_{—}045169 (SEQ ID NO 97); XM_{—}035861 (SEQ ID NO 98); NM_{—}032141 (SEQ ID NO 99); XM_{—}054973 (SEQID NO 100); XM_{—}047529 (SEQ ID NO 101); NM_{—}012201 (SEQ ID NO 102); NM_{—}018114 (SEQ ID NO 103); NM_{—}002026 (SEQ ID NO 104); NM_{—}016569 (SEQ ID NO 105); XM_{—}051146 (SEQ ID NO 106); AAK83466 (SEQ ID NO 107); AAF19255 (SEQ ID NO 108); AAC97961 (SEQ ID NO 109); AK000274 (SEQ ID NO 110); NM_{—}016648 (SEQ ID NO 111); BAA03747 (SEQ ID NO 112); XM_{—}047995 (SEQ ID NO 113); XM_{—}031992 (SEQ ID NO 114).

### DESCRIPTION OF THE INVENTION

[0002] The present invention relates to all facets of novel polynucleotides, the polypeptides they encode, antibodies and specific binding partners thereto, and their applications to research, diagnosis, drug discovery, therapy, clinical medicine, forensic science and medicine, etc. The polynucleotides are differentially regulated in breast cancer and are therefore useful in variety of ways, including, but not limited to, as molecular markers, as drug targets, and for detecting, diagnosing, staging, monitoring, prognosticating, preventing or treating, determining predisposition to, etc., diseases and conditions especially relating to breast cancer, but to other diseases and disorders, as well. The identification of specific genes, and groups of genes, expressed in pathways physiologically relevant to breast cancer permits the definition of functional and disease pathways, and the delineation of targets in these pathways which are useful in diagnostic, therapeutic, and clinical applications. The present invention also relates to methods of using the polynucleotides and related products (proteins, antibodies, etc.) in business and computer-related methods, e.g., advertising, displaying, offering, selling, etc., such products for sale, commercial use, licensing, etc.

[0003] Breast Cancer

[0004] Breast cancer is the second leading cause of cancer death for all women (after lung cancer), and the leading overall cause of death in women between the ages of 40 and 55. In 2000, several hundred thousand new cases of female invasive breast cancer were diagnosed, and about 40,000 women died from the disease. Nearly 43,000 cases of female in situ (preinvasive) breast cancer were diagnosed in 2000.

[0005] There is not one single disease that can be called breast cancer. Instead, it is highly heterogeneous, exhibiting a wide range of different phenotypes and genotypes. No single gene or protein has been identified which is responsible for the etiology of all breast cancers. It is likely that diagnostic and prognostic markers for breast cancer disease will involve the identification and use of many different genes and gene products to reflect its multifactorial origin.

[0006] The normal female breast comprises ducts and lobuloalveolar structures surrounded by basement membranes and collagenous stroma with fibroblasts, vessels, and fat. The basic unit of function in the breast are the lobuloalveolar structures which produce the milk secretions. Each lobule drains into a lactiferous duct that empties into a lactiferous sinus beneath the nipple. The ducts are lined with epithelial cells, containing few mitochondria and sparse endoplasmic reticulum. The lobules contain luminal epithelial cells, basal epithelial cells, and myoepithelial cells. The basal and epithelial cells are sometimes grouped together. The luminal cells can be differentiated immuno-histochemically from the myoepithelial cells by their expression of keratins. The luminal cells stain with antibodies to keratin ⅚; the myoepithelial cells stains with antibodies against keratin 8/18. In addition to the presence of these cells types in the breast, there are endothelial cells associated with blood vessels, stromal cells that surround the lobular structures, adipose cells, and blood cells, such as T-lymphocytes and macrophages.

[0007] Breast carcinoma can be classified into two basic types, noninvasive (non-infiltrating) and invasive. Noninvasive carcinoma includes, e.g., intraductal carcinoma (also known as ductal carcinoma in situ or “DCIS”), intraductal papillary carcinoma, and lobular carcinoma in situ. Invasive carcinoma includes, e.g., invasive ductal carcinoma (“IDC”), invasive lobular carcinoma, medullary carcinoma, colloid carcinoma (mucinous carcinoma), Paget's disease, tubular carcinoma, adenoid cystic carcinoma, invasive comedocarcinoma, apocrine carcinoma, and invasive papillary carcinoma. See, also, Cancer, Principles and Practice of Oncology, DeVita et al., ed., J. B. Lippincott Company, 1982, Pages 914-922. The different cancers can generally be distinguished histologically from each other.

[0008] Over 90% of breast cancers arise in the ducts. As long as it remains with the ductal basement membranes, it is classified as a non-infiltrating or non-invasive carcinoma. DCIS is a common example. An invasive or infiltrating carcinoma shows a marked increase in dense fibrous tissue stroma, giving the tissue a hard consistency. IDC is one of the more common types of an invasive carcinoma. Frequently, an infiltrating carcinoma becomes invaded with blood and lymphatic vessels as it increases in size and malignancy. The tumor cells fill the ducts, plugging them, and invade the surrounding stroma. For general description of breast pathology, see, e.g., Robins Pathological Basis of Disease, Cotran et al., 4^{th} Edition, W. B. Saunders Company, 1989, Chapter 25.

[0009] The progression of a cancer, from its origin to a full-blown malignancy, is the subject of intense study. Hyperplasia is generally believed to precede at least some cancers, but not all hyperplasia leads to cancer, and the relationship between the two is not well understood. One hallmark of a hyperplasia that leads to cancer may be the occurrence of genomic instability, and other factors which lead to uncoupling of the cell cycle.

[0010] Intraepithelial neoplasia is one of the first detectable signs of a breast cancer, characterized by its confinement to the duct epithelia. It can also be referred to as preinvasive neoplasia, precancer, dysplasia, or CIS. See, e.g., Boone et al., Proc. Soc. Exp. Biol. Med., 216:151-165, 1997. An intraepithelial neoplasia generally consists of multiple foci of an abnormal clonal expansion of neoplastic cells. The development of the neoplasia is manifested by an increasing size of the lesion and a greater degree of cytonuclear morphological aberration, as it progresses from low grade to high grade. See, e.g., Bacus et al., Cancer Epid. Biom. Prevent., 8:1087-1094, 1999. An early grade can be referred to as an intraductal proliferation (IDP). More advanced, pre-invasive lesions are DCIS and LCIS (lobular carcinoma in situ). It is believed that DCIS and LCIS are precursor lesions of invasive breast cancer, such as IDC. See, e.g., Buerger et al., Mol. Pathol., 53:118-121, 2000.

[0011] Breast cancers can be both staged and graded. Stage is based on the tumor and size and whether the lymph nodes are involved with the tumor. Tumor grade refers to the tumor cells' appearance under the microscope, and how closely it resembles normal tissue of the same type. If the tumor cells look normal, then it can be termed “low grade.” High grade cells look markedly different from normal cells. High grade tumors tend to behave more aggressively than lower grade.

[0012] The most widely used clinical staging system for breast cancer is one adopted by the UICC (International Union against Cancer). This system incorporates the TNM (t, tumor; N, nodes; M, metastases) classification using tumor size, involvement of the chest wall and skin, inflammatory cancer, involvement of nodes, evidence of metastases. See, e.g., Sainsbury et al., BMJ, 321:745-750, 2000. Other staging and grading systems can also be used, e.g., Bloom and Richardson grade (British J. Cancer, 11:359-377, 1957), Columbia Clinical Classification (CCC), Van Nuys (VN), etc. Grading systems have also been devised based on image analysis of neoplastic and normal cells. Bacus et al. (Cancer Epid. Biom. Prevent., 8:1087-1094, 1999) have described an image morphometric nuclear grading system for intraepitheliam neoplastic lesions, such as DCIS, which provides objective criteria to assess tumor grade. See, also, Schwartz, Human Pathol., 28:1798-1802, 1997, for a grading system for DCIS. FISH has also been used to diagnose cancers based on chromosomal aberrations. See, e.g., Komoike et al., Breast Cancer, 7:332-336, 2000.

[0013] Various genetic bases for breast cancer have begun to be identified. For instance, BRCA1, BRCA2, ATM, PTEN/MMAC1 (e.g., Ali et al., J. Natl. Cancer Inst., 91:1922-1932, 1999), MLH2, MSH2, TP53 (e.g., Done et al., Cancer Res., 58:785-789, 1998), and STK11 are associated with a higher risk of cancer. Other genes involved in breast cancer include, e.g., myc, cyclin Dl (e.g., Weinstat-Saslow et al., Nature Med., 1: 1257-1260, 1995), and c-erb-B2.

[0014] A continuing goal is to characterize the gene expression patterns of the various carcinoma forms in order to genetically differentiate them, providing important guidance in preventing and treating cancer. For instance, the c-erb-B2 gene codes for a transmembrane protein which is over-expressed in about 20-30% of all breast cancers. Based on this information, immunotherapy using an anti-c-erb-B2 antibody has been developed and successfully used to treat breast cancer. See, e.g., Pegram and Slamon, Semin Oncol., 5, Suppl 9:13, 2000. Molecular pictures of cancer, such as the pattern of up-regulated genes identified herein, provide an important tool for molecularly dissecting and classifying cancer, identifying drug targets, providing prognosis and therapeutic information, etc. For instance, an array of polynucleotides corresponding to genes differentially regulated in breast cancer can be used to screen tissue samples for the existence of cancer, to categorize the cancer (e.g., by the particular pattern observed), to grade the cancer (e.g., by the number of up-regulated genes and their amounts of expression), to identify the source of a secondary tumor, to screen for metastatic cells, etc. These arrays can be used in combination with other markers, e.g., keratin immunophenotyping (e.g., CK ⅚), c-erb-B2, estrogen receptor (ER) status, etc., and any of the grading systems mentioned above.

[0015] Table 1 is a list of the differentially regulated genes, the cellular locations of the polypeptides coded for by the genes, and their corresponding functional and structural polypeptide domains. The polynucleotide and polypeptide sequences are shown in FIGS. 1-20 and SEQ ID NOS 1-92. Table 3 summarizes the expression profile of these genes.

[0016] Membrane (i.e., cell-surface) proteins coded for by up-regulated genes (e.g., BCU0067, BCU0149, BCU0721; see, Table I for others) are useful targets for antibodies and other binding partners (e.g., ligands, aptamers, small peptides, etc.) to selectively target agents to a breast cancer tissue for any purpose, included, but not limited to, imaging, therapeutic, diagnostic, drug delivery, gene therapy, etc. For example, binding partners, such as antibodies, can be used to treat carcinomas in analogy to how c-erbB-2 antibodies are used to breast cancer. Membrane (e.g., when shed into the blood and other fluid) and extracellular proteins can also be used as diagnostic markers for cancer, and to assess the progress of the disease, e.g., in analogy to how PSA levels are used to diagnose prostate cancer. Useful antibodies or other binding partners include those that are specific for parts of the polypeptide which are exposed extracellularly as indicated in Table 1.

[0017] Polynucleotides of the present invention can also be used to detect metastatic cells in the blood. For instance, BCU0120, BCU0156, BCU0258, BCU0475, BCU0504, BCU0571, BCU0770, BCU0840, BCU0862, BCU0918, and BCU0205 are absent from peripheral blood cells, and can therefore be used in diagnostic tests to assess whether breast cancer cells have metastasized from the primary site.

[0018] Polynucleotides of the present invention have been mapped to specific chromosomal bands. Different human disorders are associated with these chromosome locations. See, Table 2. The polynucleotides and polypeptides they encode can be used as linkage markers, diagnostic targets, therapeutic targets, for any of the mentioned disorders, as well as any disorders or genes mapping in proximity to them. Of particular interest are those genes which map to cancer loci, such as BCU0371, BCU0720, BCU0721, BCU0730, BCU0862, and BCU0715.

[0019] BCU0715 represents alternative splice forms of a calpain inhibitor. Calpains are neutral cysteine proteases. Calpain inhibitors have a number of uses, e.g., to inhibit the formation of cataracts (e.g., Current Eye Res., 22(4):280-285, 2001), to treat brain ischemia (e.g., NeuroReport, 12:3927-3931, 1999), to treat and/or prevent neuronal damage, including brain, ear, eye, and other sensory organs (e.g., Brain Res., 850(1-2):234-43, 1999), to treat and/or prevent muscle degeneration (e.g., Stracher, Ann. N.Y. Acad. Sci., 884:52-9, 1999), to treat and/or prevent tinnitus (Shulman, Int. Tinnitus J., 4(2): 134-140, 1998), to treat myocardial injury, to identify calpain inhibitors, etc. Calpain inhibitory activity can be measured routinely, e.g., by measuring the inhibition of a neutral cysteine proteases (see, e.g., Wronski et al., J. Neural Transm., 107:145-157, 2000; Meyer et al., Biochem. J., 314 (Pt. 2):511-519, 1996).

[0020] The present invention relates to the complete polynucleotide and polypeptide sequences disclosed herein, as well as fragments thereof. Useful fragments include those which are unique and which do not overlap any known gene (e.g., amino acids residues 1-105 of BCU0021 of SEQ ID NO 8), which overlap with a known sequence (e.g., amino acid residues 106-404 of BCU0021 of SEQ ID NO 8), which span alternative splice junctions (e.g., comprising amino acid residues 166-167 of BCUO156 of SEQ ID NO 22), which are unique to a public sequence as indicated in the Figures (e.g., amino acids 167-185 of XM_{—}108902 of SEQ ID NO 95), which span an alternative splice junction of a public sequence (e.g., 258-259 of XM_{—}108902 of SEQ ID NO 95), etc. Unique sequences can also be described as being specific for a gene because they are characteristic of the gene, but not related genes. The unique or specific sequences included polypeptide sequences, coding nucleotide sequences (e.g., as illustrated in the figures), and non-coding nucleotide sequences.

[0021] Below, for illustration, are some examples of polypeptides (included are the polynucleotides which encode them); however, the present invention includes all fragments, especially of the categories mentioned above are exemplified below.

[0022] BCU0021 (SEQ ID NO 7-8): polypeptides comprising, consisting of, or consisting essentially of about amino acids 1-105, polypeptide fragments thereof, and polynucleotides encoding said polypeptides;

[0023] BCU0067 (SEQ ID NO 9-10): polypeptides comprising, consisting of, or consisting essentially of about amino acids 1-112, polypeptide fragments thereof, and polynucleotides encoding said polypeptides;

[0024] BCUO156 (SEQ ID NO 21-22): polypeptides comprising, consisting of, or consisting essentially of about amino acids 240-279, 1759-1849, polypeptide fragments thereof, and polynucleotides encoding said polypeptides;

[0025] BCU0258 (SEQ ID NO 23-24): polypeptides comprising, consisting of, or consisting essentially of about amino acids 1-646, 860-1078, polypeptide fragments thereof, and polynucleotides encoding said polypeptides;

[0026] BCU0343 (SEQ ID NO 25-26): polypeptides comprising, consisting of, or consisting essentially of about amino acids 1-10, polypeptide fragments thereof, and polynucleotides encoding said polypeptides;

[0027] BCU0408 (SEQ ID NO 31-32): polypeptides comprising, consisting of, or consisting essentially of about amino acids 141-143, polypeptide fragments thereof, and polynucleotides encoding said polypeptides;

[0028] BCU0504 (SEQ ID NO 35-36): polypeptides comprising, consisting of, or consisting essentially of about amino acids 39-41, polypeptide fragments thereof, and polynucleotides encoding said polypeptides;

[0029] BCU0720 (SEQ ID NO 39-40): polypeptides comprising, consisting of, or consisting essentially of about amino acids 1-504, polypeptide fragments thereof, and polynucleotides encoding said polypeptides;

[0030] BCU0721 (SEQ ID NO 41-42): polypeptides comprising, consisting of, or consisting essentially of about amino acids 27-35, 225, 526, 702, 707, polypeptide fragments thereof, and polynucleotides encoding said polypeptides;

[0031] BCU0730A (SEQ ID NO 43-44): polypeptides comprising, consisting of, or consisting essentially of about amino acids 27, 133-543, polypeptide fragments thereof, and polynucleotides encoding said polypeptides;

[0032] BCU0730B (SEQ ID NO 45-46): polypeptides comprising, consisting of, or consisting essentially of about amino acids 27, 133-516, polypeptide fragments thereof, and polynucleotides encoding said polypeptides;

[0033] BCU0730C (SEQ ID NO 47-48): polypeptides comprising, consisting of, or consisting essentially of about amino acids 27, 133-538, polypeptide fragments thereof, and polynucleotides encoding said polypeptides, BCU0730D (SEQ ID NO 49-50): polypeptides comprising, consisting of, or consisting essentially of about amino acids 27, 57-83, 160-574, polypeptide fragments thereof, and polynucleotides encoding said polypeptides;

[0034] BCU0770 (SEQ ID NO 51-52): polypeptides comprising, consisting of, or consisting essentially of about amino acids 1-37, 433-463, polypeptide fragments thereof, and polynucleotides encoding said polypeptides;

[0035] BCU0840 (SEQ ID NO 53-54): polypeptides comprising, consisting of, or consisting essentially of about amino acids 220-221, 470-600, 639-655, polypeptide fragments thereof, and polynucleotides encoding said polypeptides;

[0036] BCU0947 (SEQ ID NO 61-62): polypeptides comprising, consisting of, or consisting essentially of about amino acids 1-1753, polypeptide fragments thereof, and polynucleotides encoding said polypeptides;

[0037] BCU1034 (SEQ ID NO 63-64): polypeptides comprising, consisting of, or consisting essentially of about amino acids 1-41, 42-59, 126, 195, polypeptide fragments thereof, and polynucleotides encoding said polypeptides;

[0038] BCU0988A (SEQ ID NO 83-84): polypeptides comprising, consisting of, or consisting essentially of about amino acids 1-59, 328-391, polypeptide fragments thereof, and polynucleotides encoding said polypeptides;

[0039] BCU0988B (SEQ ID NO 85-86): polypeptides comprising, consisting of, or consisting essentially of about amino acids 1-59, polypeptide fragments thereof, and polynucleotides encoding said polypeptides;

[0040] BCU0586 (SEQ ID NO 71-72): polypeptides comprising, consisting of, or consisting essentially of about amino acids 1-704, 705-711, polypeptide fragments thereof, and polynucleotides encoding said polypeptides;

[0041] BCU0715A (SEQ ID NO 73-74): polypeptides comprising, consisting of, or consisting essentially of about amino acids 1-113, 491, 675, polypeptide fragments thereof, and polynucleotides encoding said polypeptides;

[0042] BCU0715B (SEQ ID NO 75-76): polypeptides comprising, consisting of, or consisting essentially of about amino acids 91-92, polypeptide fragments thereof, and polynucleotides encoding said polypeptides; BCU0715C (SEQ ID NO 77-78): polypeptides comprising, consisting of, or consisting essentially of about amino acids 104-105, polypeptide fragments thereof, and polynucleotides encoding said polypeptides;

[0043] BCU0205A (SEQ ID NO 79-80): polypeptides comprising, consisting of, or consisting essentially of about amino acids 1-85, polypeptide fragments thereof, and polynucleotides encoding said polypeptides;

[0044] BCU0205B (SEQ ID NO 81-82): polypeptides comprising, consisting of, or consisting essentially of about amino acids 1-79, 80-167, 168-945, polypeptide fragments thereof, and polynucleotides encoding said polypeptides;

[0045] BCU0518 (SEQ ID NO 87-88): polypeptides comprising, consisting of, or consisting essentially of about amino acids 1-35, polypeptide fragments thereof, and polynucleotides encoding said polypeptides.

[0046] Nucleic Acids

[0047] In accordance with the present invention, genes have been identified which are differentially expressed in breast cancer. These genes can be further divided into groups based on additional characteristics of their expression and the tissues in which they are expressed. For instance, genes can be further subdivided based on the stage and/or grade of the cancer in which they are expressed. Genes can also be grouped based on their penetrance in a breast cancer, e.g., expressed in all breast cancers examined, expressed in a certain percentage of breast cancers examined, etc. These groupings do not restrict or limit the use such genes in therapeutic, diagnostic, prognostic, etc., applications. For instance, a gene which is expressed in only some cancers (e.g., incompletely penetrant) may be useful in therapeutic applications to treat a subset of cancers. Similarly, a co-penetrant gene, or a gene which is expressed in breast and other normal tissues, may be useful as a therapeutic or diagnostic, even if its expression pattern is not highly breast cancer specific. Thus, the uses of the genes or their products are not limited by their patterns of expression.

[0048] By the phrase “differential expression,” it is meant that the levels of expression of a gene, as measured by its transcription or translation product, are different depending upon the specific cell-type or tissue (e.g., in an averaging assay that looks at a population of cells). There are no absolute amounts by which the gene expression levels must vary, as long as the differences are measurable.

[0049] The phrase “up-regulated” indicates that an mRNA transcript or other nucleic acid corresponding to a polynucleotide of the present invention is expressed in larger amounts in a cancer as compared to the same transcript expressed in normal cells from which the cancer was derived. In general, up-regulation can be assessed by any suitable method, including any of the nucleic acid detection and hybridization methods mentioned below, as well as polypeptide-based methods. Up-regulation also includes going from substantially no expression in a normal tissue, from detectable expression in a normal tissue, from significant expression in a normal tissue, to higher levels in the cancer.

[0050] The phrase “down-regulated” indicates that an mRNA transcript or other nucleic acid corresponding to a polynucleotide of the present invention is expressed in lower amounts in a cancer as compared to the same transcript expressed in normal cells from which the cancer was derived. A down-regulated gene can show no detectable expression, or any amount of expression which is less than the gene's expression in normal tissue.

[0051] Differential regulation can be determined by any suitable method, e.g., by comparing its abundance per gram of RNA (e.g., total RNA, polyadenylated mRNA, etc.) extracted from a breast tissue in comparison to the corresponding normal tissue. The normal tissue can be from the same or different individual or source. For convenience, it can be supplied as a separate component or in a kit in combination with probes and other reagents for detecting genes. The quantity by which a nucleic acid is differentially-regulated can be any value, e.g., about 10% more or less of normal expression, about 50% more or less of normal expression, 2-fold more or less, 5-fold more or less, 10-fold more or less, etc.

[0052] The amount of transcript can also be compared to a different gene in the same sample, especially a gene whose abundance is known and substantially no different in its expression between normal and cancer cells (e.g., a “control” gene). If re presented as a ratio, with the quantity of differentially-regulated gene transcript in the numerator and the control gene transcript in the denominator, the ratio would be larger, e.g., in breast cancer than in a sample from normal breast tissue.

[0053] Differential-regulation can arise through a number of different mechanisms. The present invention is not bound by any specific way through which it occurs. Differential-regulation of a polynucleotide can occur, e.g., by modulating (1) transcriptional rate of the gene (e.g., increasing its rate, inducing or stimulating its transcription from a basal, low-level rate, etc.), (2) the post-transcriptional processing of RNA transcripts, (3) the transport of RNA from the nucleus into the cytoplasm, (4) the RNA nuclear and cytoplasmic turnover (e.g., by virtue of having higher stability or resistance to degradation), and combinations thereof. See, e.g., Tollervey and Caceras, Cell, 103:703-709, 2000.

[0054] A differentially-regulated polynucleotide is useful in a variety of different applications as described in greater details below. Because it is more abundant in cancer, it and its expression products can be used in a diagnostic test to assay for the presence of cancer, e.g., in tissue sections, in a biopsy sample, in total RNA, in lymph, in blood, etc. Differentially-regulated polynucleotides and polypeptides can be used individually, or in groups, to assess the cancer, e.g., to determine the specific type of cancer, its stage of development, the nature of the genetic defect, etc., or to assess the efficacy of a treatment modality. How to use polynucleotides in diagnostic and prognostic assays is discussed below. In addition, the polynucleotides and the polypeptides they encode, can serve as a target for therapy or drug discovery. A polypeptide, coded for by a differentially-regulated polynucleotide, which is displayed on the cell-surface, can be a target for immunotherapy to destroy, inhibit, etc., the diseased tissue. Differentially-regulated transcripts can also be used in drug discovery schemes to identify pharmacological agents which suppress, inhibit, etc., their differential-regulation, thereby preventing the phenotype associated with their expression. Thus, a differentially-regulated polynucleotide and its expression products of the present invention have significant applications in diagnostic, therapeutic, prognostic, drug development, and related areas.

[0055] The expression patterns of the differentially expressed genes disclosed herein can be described as a “fingerprint” in that they are a distinctive pattern displayed by a cancer. Just as with a fingerprint, an expression pattern can be used as a unique identifier to characterize the status of a tissue sample. The list of genes represented SEQ ID NOS 1, 3, 5, 7, 9, 11, 13, 15, 17, 19, 21, 23, 25, 27, 29, 31, 33, 35, 37, 39, 41, 43, 45, 47, 49, 51, 53, 55, 57, 59, 61, 63, 65, 67, 69, 71, 73, 75, 77, 79, 81, 83, 85, 87, 89, and 91, provides an example of a cell expression profile for a breast cancer. It can be used as a point of reference to compare and characterize unknown samples and samples for which further information is sought. Tissue fingerprints can be used in many ways, e.g., to classify an unknown tissue as being a breast cancer, to determine the origin of a particular cancer (e.g., the origin of metastatic cells), to determine the presence of a cancer in a biopsy sample, to assess the efficacy of a cancer therapy in a human patient or a non-human animal model, to detect circulating cancer cells in blood or a lymph node biopsy, etc. While the expression profile of the complete gene set represented by SEQ ID NOS 1, 3, 5, 7, 9, 11, 13, 15, 17, 19, 21, 23, 25, 27, 29, 31, 33, 35, 37, 39, 41, 43, 45, 47, 49, 51, 53, 55, 57, 59, 61, 63, 65, 67, 69, 71, 73, 75, 77, 79, 81, 83, 85, 87, 89, and 91, may be most informative, a fingerprint containing expression information from less than the full collection can be useful, as well. In the same way that an incomplete fingerprint may contain enough of the pattern of whorls, arches, loops, and ridges, to identify the individual, a cell expression fingerprint containing less than the full complement may be adequate to provide useful and unique identifying and other information about the sample. Moreover, cancer is a multifactorial disease, involving genetic aberrations in more than gene locus. This multifaceted nature may be reflected in different cell expression profiles associated with breast cancers arising in different individuals, in different locations in the same individual, or even within the same cancer locus. As a result, a complete match with a particular cell expression profile, as shown herein, is not necessary to classify a cancer as being of the same type or stage. Similarity to one cell expression profile, e.g., as compared to another, can be adequate to classify cancer types, grades, and stages.

[0056] A mammalian polynucleotide, or fragment thereof, of the present invention is a polynucleotide having a nucleotide sequence obtainable from a natural source. When the species name is used, e.g., human, it indicates that the polynucleotide or polypeptide is obtainable from a natural source. It therefore includes naturally-occurring normal It therefore includes naturally-occurring normal, naturally-occurring mutant, and naturally-occurring polymorphic alleles (e.g., SNPs), differentially-spliced transcripts, splice-variants, etc. By the term “naturally-occurring,” it is meant that the polynucleotide is obtainable from a natural source, e.g., animal tissue and cells, body fluids, tissue culture cells, forensic samples. Natural sources include, e.g., living cells obtained from tissues and whole organisms, tumors, cultured cell lines, including primary and immortalized cell lines. Naturally-occurring mutations can include deletions (e.g., a truncated amino- or carboxy-terminus), substitutions, inversions, or additions of nucleotide sequence. These genes can be detected and isolated by polynucleotide hybridization according to methods which one skilled in the art would know, e.g., as discussed below.

[0057] A polynucleotide according to the present invention can be obtained from a variety of different sources. It can be obtained from DNA or RNA, such as polyadenylated mRNA or total RNA, e.g., isolated from tissues, cells, or whole organism. The polynucleotide can be obtained directly from DNA or RNA, from a cDNA library, from a genomic library, etc. The polynucleotide can be obtained from a cell or tissue (e.g., from an embryonic or adult tissues) at a particular stage of development, having a desired genotype, phenotype, disease status, etc.

[0058] The polynucleotides described in SEQ ID NOS 1, 3, 5, 7, 9, 11, 13, 15, 17, 19, 21, 23, 25, 27, 29, 31, 33, 35, 37, 39, 41, 43, 45, 47, 49, 51, 53, 55, 57, 59, 61, 63, 65, 67, 69, 71, 73, 75, 77, 79, 81, 83, 85, 87, 89, and 91 can be partial sequences that correspond to full-length, naturally-occurring transcripts. The present invention includes, as well, full-length polynucleotides that comprise these partial sequences, e.g., genomic DNAs and polynucleotides comprising a start and stop codon, a start codon and a polyA tail, a transcription start and a polyA tail, etc. These sequences can be obtained by any suitable method, e.g., using a partial sequence as a probe to select a full-length cDNA from a library containing full-length inserts. A polynucleotide which “codes without interruption” refers to a polynucleotide having a continuous open reading frame (“ORF”) as compared to an ORF which is interrupted by introns or other noncoding sequences.

[0059] Polynucleotides and polypeptides (including any part of a differentially regulated breast cancer gene) can be excluded as compositions from the present invention if, e.g., listed in a publicly available databases on the day this application was filed and/or disclosed in a patent application having an earlier filing or priority date than this application and/or conceived and/or reduced to practice earlier than a polynucleotide in this application.

[0060] As described herein, the phrase “an isolated polynucleotide which is SEQ ID NO,” or “an isolated polynucleotide which is selected from SEQ ID NO,” refers to an isolated nucleic acid molecule from which the recited sequence was derived (e.g., a cDNA derived from mRNA; cDNA derived from genomic DNA). Because of sequencing errors, typographical errors, etc., the actual naturally-occurring sequence may differ from a SEQ ID listed herein. Thus, the phrase indicates the specific molecule from which the sequence was derived, rather than a molecule having that exact recited nucleotide sequence, analogously to how a culture depository number refers to a specific cloned fragment in a cryotube.

[0061] As explained in more detail below, a polynucleotide sequence of the invention can contain the complete sequence as shown in SEQ ID NOS 1, 3, 5, 7, 9, 11, 13, 15, 17, 19, 21, 23, 25, 27, 29, 31, 33, 35, 37, 39, 41, 43, 45, 47, 49, 51, 53, 55, 57, 59, 61, 63, 65, 67, 69, 71, 73, 75, 77, 79, 81, 83, 85, 87, 89, and 91, degenerate sequences thereof, anti-sense, muteins thereof, genes comprising said sequences, full-length cDNAs comprising said sequences, complete genomic sequences, fragments thereof, homologs, primers, nucleic acid molecules which hybridize thereto, derivatives thereof, etc.

[0062] Genomic

[0063] The present invention also relates genomic DNA from which the polynucleotides of the present invention can be derived. A genomic DNA coding for a human, mouse, or other mammalian polynucleotide, can be obtained routinely, for example, by screening a genomic library (e.g., a YAC library) with a polynucleotide of the present invention, or by searching nucleotide databases, such as GenBank and EMBL, for matches. Promoter and other regulatory regions (including both 5′ and 3′ regions, as well introns) can be identified upstream or downstream of coding and expressed RNAs, and assayed routinely for activity, e.g., by joining to a reporter gene (e.g., CAT, GFP, alkaline phosphatase, luciferase, galatosidase). A promoter obtained from a breast cancer gene can be used, e.g., in gene therapy to obtain cancer-specific expression of a heterologous gene (e.g., coding for a therapeutic product or cytotoxin). 5′ and 3′ sequences (including, UTRs and introns) can be used to modulate or regulate stability, transcription, and translation of nucleic acids, including the sequence to which is attached in nature, as well as heterologous nucleic acids.

[0064] Constructs

[0065] A polynucleotide of the present invention can comprise additional polynucleotide sequences, e.g., sequences to enhance expression, detection, uptake, cataloging, tagging, etc. A polynucleotide can include only coding sequence; a coding sequence and additional non-naturally occurring or heterologous coding sequence (e.g., sequences coding for leader, signal, secretory, targeting, enzymatic, fluorescent, antibiotic resistance, and other functional or diagnostic peptides); coding sequences and non-coding sequences, e.g., untranslated sequences at either a 5′ or 3′ end, or dispersed in the coding sequence, e.g., introns.

[0066] A polynucleotide according to the present invention also can comprise an expression control sequence operably linked to a polynucleotide as described above. The phrase “expression control sequence” means a polynucleotide sequence that regulates expression of a polypeptide coded for by a polynucleotide to which it is functionally (“operably”) linked. Expression can be regulated at the level of the mRNA or polypeptide. Thus, the expression control sequence includes mRNA-related elements and protein-related elements. Such elements include promoters, enhancers (viral or cellular), ribosome binding sequences, transcriptional terminators, etc. An expression control sequence is operably linked to a nucleotide coding sequence when the expression control sequence is positioned in such a manner to effect or achieve expression of the coding sequence. For example, when a promoter is operably linked 5′ to a coding sequence, expression of the coding sequence is driven by the promoter. Expression control sequences can include an initiation codon and additional nucleotides to place a partial nucleotide sequence of the present invention in-frame in order to produce a polypeptide (e.g., pET vectors from Promega have been designed to permit a molecule to be inserted into all three reading frames to identify the one that results in polypeptide expression). Expression control sequences can be heterologous or endogenous to the normal gene.

[0067] A polynucleotide of the present invention can also comprise nucleic acid vector sequences, e.g., for cloning, expression, amplification, selection, etc. Any effective vector can be used. A vector is, e.g., a polynucleotide molecule which can replicate autonomously in a host cell, e.g., containing an origin of replication. Vectors can be useful to perform manipulations, to propagate, and/or obtain large quantities of the recombinant molecule in a desired host. A skilled worker can select a vector depending on the purpose desired, e.g., to propagate the recombinant molecule in bacteria, yeast, insect, or mammalian cells. The following vectors are provided by way of example. Bacterial: pQE70, pQE60, pQE-9 (Qiagen), pBS, pD10, Phagescript, phiX174, pBK Phagemid, pNH8A, pNH16a, pNHl8Z, pNH46A (Stratagene); Bluescript KS+II (Stratagene); ptrc99a, pKK223-3, pKK233-3, pDR540, pRIT5 (Pharmacia). Eukaryotic: PWLNEO, pSV2CAT, pOG44, pXT1, pSG (Stratagene), pSVK3, PBPV, PMSG, pSVL (Pharmacia), pCR2.1/TOPO, pCR11/TOPO, pCR4/TOPO, pTrcHisB, pCMV6-XL4, etc. However, any other vector, e.g., plasmids, viruses, or parts thereof, may be used as long as they are replicable and viable in the desired host. The vector can also comprise sequences which enable it to replicate in the host whose genome is to be modified.

[0068] Hybridization

[0069] Polynucleotide hybridization, as discussed in more detail below, is useful in a variety of applications, including, in gene detection methods, for identifying mutations, for making mutations, to identify homologs in the same and different species, to identify related members of the same gene family, in diagnostic and prognostic assays, in therapeutic applications (e.g., where an antisense polynucleotide is used to inhibit expression), etc.

[0070] The ability of two single-stranded polynucleotide preparations to hybridize together is a measure of their nucleotide sequence complementarity, e.g., base-pairing between nucleotides, such as A-T, G-C, etc. The invention thus also relates to polynucleotides, and their complements, which hybridize to a polynucleotide comprising a nucleotide sequence as setforthin SEQ IDNOS 1, 3, 5, 7, 9, 11, 13, 15, 17, 19, 21, 23, 25, 27, 29, 31, 33, 35, 37, 39, 41, 43, 45, 47, 49, 51, 53, 55, 57, 59, 61, 63, 65, 67, 69, 71, 73, 75, 77, 79, 81, 83, 85, 87, 89, and 91 and genomic sequences thereof. A nucleotide sequence hybridizing to the latter sequence will have a complementary polynucleotide strand, or act as a template for one in the presence of a polymerase (i.e., an appropriate polynucleotide synthesizing enzyme). The present invention includes both strands of polynucleotide, e.g., a sense strand and an anti-sense strand.

[0071] Hybridization conditions can be chosen to select polynucleotides which have a desired amount of nucleotide complementarity with the nucleotide sequences set forth in SEQ ID NOS 1, 3, 5, 7, 9, 11, 13, 15, 17, 19, 21, 23, 25, 27, 29, 31, 33, 35, 37, 39, 41, 43, 45, 47, 49, 51, 53, 55, 57, 59, 61, 63, 65, 67, 69, 71, 73, 75, 77, 79, 81, 83, 85, 87, 89, and 91 and genomic sequences thereof. A polynucleotide capable of hybridizing to such sequence, preferably, possesses, e.g., about 70%, 75%, 80%, 85%, 87%, 90%, 92%, 95%, 97%, 99%, or 100% complementarity, between the sequences. The present invention particularly relates to polynucleotide sequences which hybridize to the nucleotide sequences set forth in SEQ ID NOS 1, 3, 5, 7, 9, 11, 13, 15, 17, 19, 21, 23, 25, 27, 29, 31, 33, 35, 37, 39, 41, 43, 45, 47, 49, 51, 53, 55, 57, 59, 61, 63, 65, 67, 69, 71, 73, 75, 77, 79, 81, 83, 85, 87, 89, and 91 or genomic sequences thereof, under low or high stringency conditions. These conditions can be used, e.g., to select corresponding homologs in non-human species.

[0072] Polynucleotides which hybridize to polynucleotides of the present invention can be selected in various ways. Filter-type blots (i.e., matrices containing polynucleotide, such as nitrocellulose), glass chips, and other matrices and substrates comprising polynucleotides (short or long) of interest, can be incubated in a prehybridization solution (e.g., 6×SSC, 0.5% SDS, 100 μg/ml denatured salmon sperm DNA, 5× Denhardt's solution, and 50% formamide), at 22-68° C., overnight, and then hybridized with a detectable polynucleotide probe under conditions appropriate to achieve the desired stringency. In general, when high homology or sequence identity is desired, a high temperature can be used (e.g., 65° C.). As the homology drops, lower washing temperatures are used. For salt concentrations, the lower the salt concentration, the higher the stringency. The length of the probe is another consideration. Very short probes (e.g., less than 100 base pairs) are washed at lower temperatures, even if the homology is high. With short probes, formamide can be omitted. See, e.g., Current Protocols in Molecular Biology, Chapter 6, Screening of Recombinant Libraries; Sambrook et al., Molecular Cloning, 1989, Chapter 9.

[0073] For instance, high stringency conditions can be achieved by incubating the blot overnight (e.g., at least 12 hours) with a long polynucleotide probe in a hybridization solution containing, e.g., about 5×SSC, 0.5% SDS, 100 μg/ml denatured salmon sperm DNA and 50% formamide, at 42° C. Blots can be washed at high stringency conditions that allow, e.g., for less than 5% bp mismatch (e.g., wash twice in 0.1% SSC and 0.1% SDS for 30 min at 65° C.), i.e., selecting sequences having 95% or greater sequence identity.

[0074] Other non-limiting examples of high stringency conditions includes a final wash at 65° C. in aqueous buffer containing 30 mM NaCl and 0.5% SDS. Another example of high stringent conditions is hybridization in 7% SDS, 0.5 M NaPO₄, pH 7, 1 mM EDTA at 50° C., e.g., overnight, followed by one or more washes with a 1% SDS solution at 42° C. Whereas high stringency washes can allow for less than 5% mismatch, reduced or low stringency conditions can permit up to 20% nucleotide mismatch. Hybridization at low stringency can be accomplished as above, but using lower formamide conditions, lower temperatures and/or lower salt concentrations, as well as longer periods of incubation time.

[0075] Hybridization can also be based on a calculation of melting temperature (Tm) of the hybrid formed between the probe and its target, as described in Sambrook et al. Generally, the temperature Tm at which a short oligonucleotide (containing 18 nucleotides or fewer) will melt from its target sequence is given by the following equation: Tm=(number of A's and T's)×2° C.+(number of C's and G's)×4° C. For longer molecules, Tm=81.5+16.6 logio[Na⁺]+0.41 (%GC)−600/N where [Na⁺] is the molar concentration of sodium ions, %GC is the percentage of GC base pairs in the probe, and N is the length. Hybridization can be carried out at several degrees below this temperature to ensure that the probe and target can hybridize. Mismatches can be allowed for by lowering the temperature even further.

[0076] Stringent conditions can be selected to isolate sequences, and their complements, which have, e.g., at least about 90%, 95%, or 97%, nucleotide complementarity between the probe (e.g., a short polynucleotide of SEQ ID NOS 1, 3, 5, 7, 9, 11, 13, 15, 17, 19, 21, 23, 25, 27, 29, 31, 33, 35, 37, 39, 41, 43, 45, 47, 49, 51, 53, 55, 57, 59, 61, 63, 65, 67, 69, 71, 73, 75, 77, 79, 81, 83, 85, 87, 89, and 91 or genomic sequences thereof) and a target polynucleotide.

[0077] Other homologs of polynucleotides of the present invention can be obtained from mammalian and non-mammalian sources according to various methods. For example, hybridization with a polynucleotide can be employed to select homologs, e.g., as described in Sambrook et al., Molecular Cloning, Chapter 11, 1989. Such homologs can have varying amounts of nucleotide and amino acid sequence identity and similarity to such polynucleotides of the present invention. Mammalian organisms include, e.g., mice, rats, monkeys, pigs, cows, etc. Non-mammalian organisms include, e.g., vertebrates, invertebrates, zebra fish, chicken, Drosophila, C. elegans, Xenopus, yeast such as S. pombe, S. cerevisiae, roundworms, prokaryotes, plants, Arabidopsis, artemia, viruses, etc. The degree of nucleotide sequence identity between human and mouse can be about, e.g. 70% or more, 85% or more for open reading frames, etc.

[0078] Alignment

[0079] Alignments can be accomplished by using any effective algorithm. For pairwise alignments of DNA sequences, the methods described by Wilbur-Lipman (e.g., Wilbur and Lipman, Proc. Natl. Acad. Sci., 80:726-730, 1983) or Martinez/Needleman-Wunsch (e.g., Martinez, Nucleic Acid Res., 11:4629-4634, 1983) can be used. For instance, if the Martinez/Needleman-Wunsch DNA alignment is applied, the minimum match can be set at 9, gap penalty at 1.10, and gap length penalty at 0.33. The results can be calculated as a similarity index, equal to the sum of the matching residues divided by the sum of all residues and gap characters, and then multiplied by 100 to express as a percent. Similarity index for related genes at the nucleotide level in accordance with the present invention can be greater than 70%, 80%, 85%, 90%, 95%, 99%, or more. Pairs of protein sequences can be aligned by the Lipman-Pearson method (e.g., Lipman and Pearson, Science, 227:1435-1441, 1985) with k-tuple set at 2, gap penalty set at 4, and gap length penalty set at 12. Results can be expressed as percent similarity index, where related genes at the amino acid level in accordance with the present invention can be greater than 65%, 70%, 75%, 80%, 85%, 90%, 95%, 99%, or more. Various commercial and free sources of alignment programs are available, e.g., MegAlign by DNA Star, BLAST (National Center for Biotechnology Information), BCM (Baylor College of Medicine) Launcher, etc. BLAST can be used to calculate amino acid sequence identity, amino acid sequence homology, and nucleotide sequence identity. These calculations can be made along the entire length of each of the target sequences which are to be compared.

[0080] Percent sequence identity can also be determined by other conventional methods, e.g., as described in Altschul et al., Bull. Math. Bio. 48: 603-616, 1986 and Henikoff and Henikoff, Proc. Natl. Acad. Sci. USA 89:10915-10919, 1992.

[0081] Specific Polynucleotide Probes

[0082] A polynucleotide of the present invention can comprise any continuous nucleotide sequence of SEQ ID NOS 1, 3, 5, 7, 9, 11, 13, 15, 17, 19, 21, 23, 25, 27, 29, 31, 33, 35, 37, 39, 41, 43, 45, 47, 49, 51, 53, 55, 57, 59, 61, 63, 65, 67, 69, 71, 73, 75, 77, 79, 81, 83, 85, 87, 89, and 91, sequences which share sequence identity thereto, or complements thereof. The term “probe” refers to any substance that can be used to detect, identify, isolate, etc., another substance. A polynucleotide probe is comprised of nucleic acid can be used to detect, identify, etc., other nucleic acids, such as DNA and RNA.

[0083] These polynucleotides can be of any desired size that is effective to achieve the specificity desired. For example, a probe can be from about 7 or 8 nucleotides to several thousand nucleotides, depending upon its use and purpose. For instance, a probe used as a primer PCR can be shorter than a probe used in an ordered array of polynucleotide probes. Probe sizes vary, and the invention is not limited in any way by their size, e.g., probes can be from about 7-2000 nucleotides, 7-1000, 8-700, 8-600, 8-500, 8-400, 8-300, 8-150, 8-100, 8-75, 7-50, 10-25, 14-16, at least about 8, at least about 10, at least about 15, at least about 25, etc. The polynucleotides can have non-naturally-occurring nucleotides, e.g., inosine, AZT, 3TC, etc. The polynucleotides can have 100% sequence identity or complementarity to a sequence of SEQ ID NOS 1, 3, 5, 7, 9, 11, 13, 15, 17, 19, 21, 23, 25, 27, 29, 31, 33, 35, 37, 39, 41, 43, 45, 47, 49, 51, 53, 55, 57, 59, 61, 63, 65, 67, 69, 71, 73, 75, 77, 79, 81, 83, 85, 87, 89, and 91, or it can have mismatches or nucleotide substitutions, e.g., 1, 2, 3, 4, or 5 substitutions. The probes can be single-stranded or double-stranded.

[0084] In accordance with the present invention, a polynucleotide can be present in a kit, where the kit includes, e.g., one or more polynucleotides, a desired buffer (e.g., phosphate, tris, etc.), detection compositions, RNA or cDNA from different tissues to be used as controls, libraries, etc. The polynucleotide can be labeled or unlabeled, with radioactive or non-radioactive labels as known in the art. Kits can comprise one or more pairs of polynucleotides for amplifying nucleic acids specific for differentially-regulated genes of the present invention, e.g., comprising a forward and reverse primer effective in PCR. These include both sense and anti-sense orientations. For instance, in PCR-based methods (such as RT-PCR), a pair of primers are typically used, one having a sense sequence and the other having an antisense sequence.

[0085] Another aspect of the present invention is a nucleotide sequence that is specific to, or for, a selective polynucleotide. The phrases “specific for” or “specific to” a polynucleotide have a functional meaning that the polynucleotide can be used to identify the presence of one or more target genes in a sample and distinguish them from non-target genes. It is specific in the sense that it can be used to detect polynucleotides above background noise (“non-specific binding”). A specific sequence is a defined order of nucleotides (or amino acid sequences, if it is a polypeptide sequence) which occurs in the polynucleotide, e.g., in the nucleotide sequences of SEQ ID NOS 1, 3, 5, 7, 9, 11, 13, 15, 17, 19, 21, 23, 25, 27, 29, 31, 33, 35, 37, 39, 41, 43, 45, 47, 49, 51, 53, 55, 57, 59, 61, 63, 65, 67, 69, 71, 73, 75, 77, 79, 81, 83, 85, 87, 89, and 91, and which is characteristic of that target sequence, and substantially no non-target sequences. A probe or mixture of probes can comprise a sequence or sequences that are specific to a plurality of target sequences, e.g., where the sequence is a consensus sequence, a functional domain, etc., e.g., capable of recognizing a family of related genes. Such sequences can be used as probes in any of the methods described herein or incorporated by reference. Both sense and antisense nucleotide sequences are included. A specific polynucleotide according to the present invention can be determined routinely.

[0086] A polynucleotide comprising a specific sequence can be used as a hybridization probe to identify the presence of, e.g., human or mouse polynucleotide, in a sample comprising a mixture of polynucleotides, e.g., on a Northern blot. Hybridization can be performed under high stringent conditions (see, above) to select polynucleotides (and their complements which can contain the coding sequence) having at least 90%, 95%, 99%, etc., identity (i.e., complementarity) to the probe, but less stringent conditions can also be used. A specific polynucleotide sequence can also be fused in-frame, at either its 5′ or 3′ end, to various nucleotide sequences as mentioned throughout the patent, including coding sequences for enzymes, detectable markers, GFP, etc, expression control sequences, etc.

[0087] A polynucleotide probe, especially one that is specific to a polynucleotide of the present invention, can be used in gene detection and hybridization methods as already described. In one embodiment, a specific polynucleotide probe can be used to detect whether a particular tissue or cell-type is present in a target sample. To carry out such a method, a selective polynucleotide can be chosen which is characteristic of the desired target tissue. Such polynucleotide is preferably chosen so that it is expressed or displayed in the target tissue, but not in other tissues which are present in the sample. For instance, if detection of breast cancer is desired, it may not matter whether the selective polynucleotide is expressed in other tissues, as long as it is not expressed in cells normally present in blood, e.g., peripheral blood mononuclear cells. Starting from the selective polynucleotide, a specific polynucleotide probe can be designed which hybridizes (if hybridization is the basis of the assay) under the hybridization conditions to the selective polynucleotide, whereby the presence of the selective polynucleotide can be determined.

[0088] Probes which are specific for polynucleotides of the present invention can also be prepared using involve transcription-based systems, e.g., incorporating an RNA polymerase promoter into a selective polynucleotide of the present invention, and then transcribing anti-sense RNA using the polynucleotide as a template. See, e.g., U.S. Pat. No. 5,545,522.

[0089] Polynucleotide Composition

[0090] A polynucleotide according to the present invention can comprise, e.g., DNA, RNA, synthetic polynucleotide, peptide polynucleotide, modified nucleotides, dsDNA, ssDNA, ssRNA, dsRNA, and mixtures thereof. A polynucleotide can be single- or double-stranded, triplex, DNA:RNA, duplexes, comprise hairpins, and other secondary structures, etc. Nucleotides comprising a polynucleotide can be joined via various known linkages, e.g., ester, sulfamate, sulfamide, phosphorothioate, phosphoramidate, methylphosphonate, carbamate, etc., depending on the desired purpose, e.g., resistance to nucleases, such as RNAse H, improved in vivo stability, etc. See, e.g., U.S. Pat. No. 5,378,825. Any desired nucleotide or nucleotide analog can be incorporated, e.g., 6-mercaptoguanine, 8-oxo-guanine, etc.

[0091] Various modifications can be made to the polynucleotides, such as attaching detectable markers (avidin, biotin, radioactive elements, fluorescent tags and dyes, energy transfer labels, energy-emitting labels, binding partners, etc.) or moieties which improve hybridization, detection, and/or stability. The polynucleotides can also be attached to solid supports, e.g., nitrocellulose, magnetic or paramagnetic microspheres (e.g., as described in U.S. Pat. No. 5,411,863; U.S. Pat. No. 5,543,289; for instance, comprising ferromagnetic, supermagnetic, paramagnetic, superparamagnetic, iron oxide and polysaccharide), nylon, agarose, diazotized cellulose, latex solid microspheres, polyacrylamides, etc., according to a desired method. See, e.g., U.S. Pat. Nos. 5,470,967, 5,476,925, and 5,478,893.

[0092] Polynucleotide according to the present invention can be labeled according to any desired method. The polynucleotide can be labeled using radioactive tracers such as ³²P, ³⁵S, ³H, or ¹⁴C, to mention some commonly used tracers. The radioactive labeling can be carried out according to any method, such as, for example, terminal labeling at the 3′ or 5′ end using a radiolabeled nucleotide, polynucleotide kinase (with or without dephosphorylation with a phosphatase) or a ligase (depending on the end to be labeled). A non-radioactive labeling can also be used, combining a polynucleotide of the present invention with residues having immunological properties (antigens, haptens), a specific affinity for certain reagents (ligands), properties enabling detectable enzyme reactions to be completed (enzymes or coenzymes, enzyme substrates, or other substances involved in an enzymatic reaction), or characteristic physical properties, such as fluorescence or the emission or absorption of light at a desired wavelength, etc.

[0093] Nucleic Acid Detection Methods

[0094] Another aspect of the present invention relates to methods and processes for detecting differentially-regulated genes of the present invention. Detection methods have a variety of applications, including for diagnostic, prognostic, forensic, and research applications. To accomplish gene detection, a polynucleotide in accordance with the present invention can be used as a “probe.” The term “probe” or “polynucleotide probe” has its customary meaning in the art, e.g., a polynucleotide which is effective to identify (e.g., by hybridization), when used in an appropriate process, the presence of a target polynucleotide to which it is designed. Identification can involve simply determining presence or absence, or it can be quantitative, e.g., in assessing amounts of a gene or gene transcript present in a sample. Probes can be useful in a variety of ways, such as for diagnostic purposes, to identify homologs, and to detect, quantitate, or isolate a polynucleotide of the present invention in a test sample.

[0095] Assays can be utilized which permit quantification and/or presence/absence detection of a target nucleic acid in a sample. Assays can be performed at the single-cell level, or in a sample comprising many cells, where the assay is “averaging” expression over the entire collection of cells and tissue present in the sample. Any suitable assay format can be used, including, but not limited to, e.g., Southern blot analysis, Northern blot analysis, polymerase chain reaction (“PCR”) (e.g., Saiki et al., Science, 241:53, 1988; U.S. Pat. Nos. 4,683,195, 4,683,202, and 6,040,166; PCR Protocols: A Guide to Methods and Applications, Innis et al., eds., Academic Press, New York, 1990), reverse transcriptase polymerase chain reaction (“RT-PCR”), anchored PCR, rapid amplification of cDNA ends (“RACE”) (e.g., Schaefer in Gene Cloning and Analysis: Current Innovations, Pages 99-115, 1997), ligase chain reaction (“LCR”) (EP 320 308), one-sided PCR (Ohara et al., Proc. Natl. Acad. Sci., 86:5673-5677, 1989), indexing methods (e.g., U.S. Pat. No. 5,508,169), in siti hybridization, differential display (e.g., Liang et al., Nucl. Acid. Res., 21:3269-3275, 1993; U.S. Pat. Nos. 5,262,311, 5,599,672 and 5,965,409; WO97/18454; Prashar and Weissman, Proc. Natl. Acad. Sci., 93:659-663, and U.S. Pat. Nos. 6,010,850 and 5,712,126; Welsh et al., Nucleic Acid Res., 20:4965-4970, 1992, and U.S. Pat. No. 5,487,985) and other RNA fingerprinting techniques, nucleic acid sequence based amplification (“NASBA”) and other transcription based amplification systems (e.g., U.S. Pat. Nos. 5,409,818 and 5,554,527; WO 88/10315), polynucleotide arrays (e.g., U.S. Pat. Nos. 5,143,854, 5,424,186; 5,700,637, 5,874,219, and 6,054,270; PCT WO 92/10092; PCT WO 90/15070), Qbeta Replicase (PCT/US87/00880), Strand Displacement Amplification (“SDA”), Repair Chain Reaction (“RCR”), nuclease protection assays, subtraction-based methods, Rapid-Scan™, etc. Additional useful methods include, but are not limited to; e.g., template-based amplification methods, competitive PCR (e.g., U.S. Pat. No. 5,747,251), redox-based assays (e.g., U.S. Pat. No. 5,871,918), Taqman-based assays (e.g., Holland et al., Proc. Natl. Acad, Sci., 88:7276-7280, 1991; U.S. Pat. Nos. 5,210,015 and 5,994,063), real-time fluorescence-based monitoring (e.g., U.S. Pat. No. 5,928,907), molecular energy transfer labels (e.g., U.S. Pat. Nos. 5,348,853, 5,532,129, 5,565,322, 6,030,787, and 6,117,635; Tyagi and Kramer, Nature Biotech., 14:303-309, 1996). Any method suitable for single cell analysis of gene or protein expression can be used, including in situ hybridization, immunocytochemistry, MACS, FACS, flow cytometry, etc. For single cell assays, expression products can be measured using antibodies, PCR, or other types of nucleic acid amplification (e.g., Brady et al., Methods Mol. & Cell. Biol. 2, 17-25, 1990; Eberwine et al., 1992, Proc. Natl. Acad. Sci., 89, 3010-3014, 1992; U.S. Pat. No. 5,723,290). These and other methods can be carried out conventionally, e.g., as described in the mentioned publications.

[0096] Many of such methods may require that the polynucleotide is labeled, or comprises a particular nucleotide type useful for detection. The present invention includes such modified polynucleotides that are necessary to carry out such methods. Thus, polynucleotides can be DNA, RNA, DNA:RNA hybrids, PNA, etc., and can comprise any modification or substituent which is effective to achieve detection.

[0097] Detection can be desirable for a variety of different purposes, including research, diagnostic, prognostic, and forensic. For diagnostic purposes, it may be desirable to identify the presence or quantity of a polynucleotide sequence in a sample, where the sample is obtained from tissue, cells, body fluids, etc. In a preferred method as described in more detail below, the present invention relates to a method of detecting a polynucleotide comprising, contacting a target polynucleotide in a test sample with a polynucleotide probe under conditions effective to achieve hybridization between the target and probe; and detecting hybridization.

[0098] Any test sample in which it is desired to identify a polynucleotide or polypeptide thereof can be used, including, e.g., blood, urine, saliva, stool (for extracting nucleic acid, see, e.g., U.S. Pat. No. 6,177,251), swabs comprising tissue, biopsied tissue, tissue sections, cultured cells, etc.

[0099] Detection can be accomplished in combination with polynucleotide probes for other genes, e.g., genes which are expressed in other disease states, tissues, cells, such as brain, heart, kidney, spleen, thymus, liver, stomach, small intestine, colon, muscle, lung, testis, placenta, pituitary, thyroid, skin, adrenal gland, pancreas, salivary gland, uterus, ovary, prostate gland, peripheral blood cells (T-cells, lymphocytes, etc.), embryo, normal breast fat, adult and embryonic stem cells, specific cell-types, such as endothelial, epithelial, myocytes, adipose, luminal epithelial, basoepithelial, myoepithelial, stromal cells, etc.

[0100] Polynucleotides can be used in wide range of methods and compositions, including for detecting, diagnosing, staging, grading, assessing, prognosticating, etc. diseases and disorders associated with differentially-regulated genes of the present invention, for monitoring or assessing therapeutic and/or preventative measures, in ordered arrays, etc. Any method of detecting genes and polynucleotides of SEQ ID NOS 1, 3, 5, 7, 9, 11, 13, 15, 17, 19, 21, 23, 25, 27, 29, 31, 33, 35, 37, 39, 41, 43, 45, 47, 49, 51, 53, 55, 57, 59, 61, 63, 65, 67, 69, 71, 73, 75, 77, 79, 81, 83, 85, 87, 89, and 91 can be used; certainly, the present invention is not to be limited how such methods are implemented.

[0101] Along these lines, the present invention relates to methods of detecting differentially-regulated genes described herein in a sample comprising nucleic acid. Such methods can comprise one or more the following steps in any effective order, e.g., contacting said sample with a polynucleotide probe under conditions effective for said probe to hybridize specifically to nucleic acid in said sample, and detecting the presence or absence of probe hybridized to nucleic acid in said sample, wherein said probe is a polynucleotide which is selected from SEQ ID NOS 1, 3, 5, 7, 9, 11, 13, 15, 17, 19, 21, 23, 25, 27, 29, 31, 33, 35, 37, 39, 41, 43, 45, 47, 49, 51, 53, 55, 57, 59, 61, 63, 65, 67, 69, 71, 73, 75, 77, 79, 81, 83, 85, 87, 89, and 91, a polynucleotide having, e.g., about 70%, 80%, 85%, 90%, 95%, 99%, or more sequence identity thereto, effective or specific fragments thereof, or complements thereto. The detection method can be applied to any sample, e.g., cultured primary, secondary, or established cell lines, tissue biopsy, blood, urine, stool, cerebral spinal fluid, and other bodily fluids, for any purpose.

[0102] Contacting the sample with probe can be carried out by any effective means in any effective environment. It can be accomplished in a solid, liquid, frozen, gaseous, amorphous, solidified, coagulated, colloid, etc., mixtures thereof, matrix. For instance, a probe in an aqueous medium can be contacted with a sample which is also in an aqueous medium, or which is affixed to a solid matrix, or vice-versa.

[0103] Generally, as used throughout the specification, the term “effective conditions” means, e.g., the particular milieu in which the desired effect is achieved. Such a milieu, includes, e.g., appropriate buffers, oxidizing agents, reducing agents, pH, co-factors, temperature, ion concentrations, suitable age and/or stage of cell (such as, in particular part of the cell cycle, or at a particular stage where particular genes are being expressed) where cells are being used, culture conditions (including substrate, oxygen, carbon dioxide, etc.). When hybridization is the chosen means of achieving detection, the probe and sample can be combined such that the resulting conditions are functional for said probe to hybridize specifically to nucleic acid in said sample.

[0104] The phrase “hybridize specifically” indicates that the hybridization between single-stranded polynucleotides is based on nucleotide sequence complementarity. The effective conditions are selected such that the probe hybridizes to a preselected and/or definite target nucleic acid in the sample. For instance, if detection of a polynucleotide set forth in SEQ ID NOS 1, 3, 5, 7, 9, 11, 13, 15, 17, 19, 21, 23, 25, 27, 29, 31, 33, 35, 37, 39, 41, 43, 45, 47, 49, 51, 53, 55, 57, 59, 61, 63, 65, 67, 69, 71, 73, 75, 77, 79, 81, 83, 85, 87, 89, and 91 is desired, a probe can be selected which can hybridize to such target gene under high stringent conditions, without significant hybridization to other genes in the sample. To detect homologs of a polynucleotide set forth in SEQ ID NOS 1, 3, 5, 7, 9, 11, 13, 15, 17, 19, 21, 23, 25, 27, 29, 31, 33, 35, 37, 39, 41, 43, 45, 47, 49, 51, 53, 55, 57, 59, 61, 63, 65, 67, 69, 71, 73, 75, 77, 79, 81, 83, 85, 87, 89, and 91, the effective hybridization conditions can be less stringent, and/or the probe can comprise codon degeneracy, such that a homolog is detected in the sample.

[0105] As already mentioned, the methods can be carried out by any effective process, e.g., by Northern blot analysis, polymerase chain reaction (PCR), reverse transcriptase PCR, RACE PCR, in situ hybridization, etc., as indicated above. When PCR based techniques are used, two or more probes are generally used. One probe can be specific for a defined sequence which is characteristic of a selective polynucleotide, but the other probe can be specific for the selective polynucleotide, or specific for a more general sequence, e.g., a sequence such as polyA which is characteristic of mRNA, a sequence which is specific for a promoter, ribosome binding site, or other transcriptional features, a consensus sequence (e.g., representing a functional domain). For the former aspects, 5′ and 3′ probes (e.g., polyA, Kozak, etc.) are preferred which are capable of specifically hybridizing to the ends of transcripts. When PCR is utilized, the probes can also be referred to as “primers” in that they can prime a DNA polymerase reaction.

[0106] In addition to testing for the presence or absence of polynucleotides, the present invention also relates to determining the amounts at which polynucleotides of the present invention are expressed in sample and determining the differential expression of such polynucleotides in samples. Such methods can involve substantially the same steps as described above for presence/absence detection, e.g., contacting with probe, hybridizing, and detecting hybridized probe, but using more quantitative methods and/or comparisons to standards.

[0107] The amount of hybridization between the probe and target can be determined by any suitable methods, e.g., PCR, RT-PCR, RACE PCR, Northern blot, polynucleotide microarrays, Rapid-Scan, etc., and includes both quantitative and qualitative measurements. For further details, see the hybridization methods described above and below. Determining by such hybridization whether the target is differentially expressed (e.g., up-regulated or down-regulated) in the sample can also be accomplished by any effective means. For instance, the target's expression pattern in the sample can be compared to its pattern in a known standard, such as in a normal tissue, or it can be compared to another gene in the same sample. When a second sample is utilized for the comparison, it can be a sample of normal tissue that is known not to contain diseased cells. The comparison can be performed on samples which contain the same amount of RNA (such as polyadenylated RNA or total RNA), or, on RNA extracted from the same amounts of starting tissue. Such a second sample can also be referred to as a control or standard. Hybridization can also be compared to a second target in the same tissue sample. Experiments can be performed that determine a ratio between the target nucleic acid and a second nucleic acid (a-standard-or control), e.g., in a normal tissue. When the ratio between the target and control are substantially the same in a normal and sample, the sample is determined or diagnosed not to contain cells. However, if the ratio is different between the normal and sample tissues, the sample is determined to contain cancer cells. The approaches can be combined, and one or more second samples, or second targets can be used. Any second target nucleic acid can be used as a comparison, including “housekeeping” genes, such as beta-actin, alcohol dehydrogenase, or any other gene whose expression does not vary depending upon the disease status of the cell.

[0108] Methods of Identifying Polymorphisms, Mutations, etc., of a Differentially-Regulated Gene

[0109] Polynucleotides of the present invention can also be utilized to identify mutant alleles, SNPs, gene rearrangements and modifications, and other polymorphisms of the wild-type gene. Mutant alleles, polymorphisms, SNPs, etc., can be identified and isolated from cancers that are known, or suspected to have, a genetic component. Identification of such genes can be carried out routinely (see, above for more guidance), e.g., using PCR, hybridization techniques, direct sequencing, mismatch reactions (see, e.g., above), RFLP analysis, SSCP (e.g., Orita et al., Proc. Natl. Acad. Sci., 86:2766, 1992), etc., where a polynucleotide having a sequence selected from SEQ ID NOS 1, 3, 5, 7, 9, 11, 13, 15, 17, 19, 21, 23, 25, 27, 29, 31, 33, 35, 37, 39, 41, 43, 45, 47, 49, 51, 53, 55, 57, 59, 61, 63, 65, 67, 69, 71, 73, 75, 77, 79, 81, 83, 85, 87, 89, and 91 is used as a probe. The selected mutant alleles, SNPs, polymorphisms, etc., can be used diagnostically to determine whether a subject has, or is susceptible to a disorder associated with a differentially-regulated gene, as well as to design therapies and predict the outcome of the disorder. Methods involve, e.g., diagnosing a disorder associated with a differentially-regulated gene or determining susceptibility to a disorder, comprising, detecting the presence of a mutation in a gene represented by a polynucleotide selected from SEQ ID NOS 1, 3, 5, 7, 9, 11, 13, 15, 17, 19, 21, 23, 25, 27, 29, 31, 33, 35, 37, 39, 41, 43, 45, 47, 49, 51, 53, 55, 57, 59, 61, 63, 65, 67, 69, 71, 73, 75, 77, 79, 81, 83, 85, 87, 89, and 91. The detecting can be carried out by any effective method, e.g., obtaining cells from a subject, determining the gene sequence or structure of a target gene (using, e.g., mRNA, cDNA, genomic DNA, etc), comparing the sequence or structure of the target gene to the structure of the normal gene, whereby a difference in sequence or structure indicates a mutation in the gene in the subject. Polynucleotides can also be used to test-for mutations, SNPs, polymorphisms, etc., e.g., using mismatch DNA repair technology as described in U.S. Pat. No. 5,683,877; U.S. Pat. No. 5,656,430; Wu et al., Proc. Natl. Acacl. Sci., 89:8779-8783, 1992.

[0110] The present invention also relates to methods of detecting polymorphisms in a differentially-regulated gene, comprising, e.g., comparing the structure of: genomic DNA comprising all or part of said gene, mRNA comprising all or part of said gene, cDNA comprising all or part of said gene, or a polypeptide comprising all or part of said gene, with the structure of said gene as set forth herein. The methods can be carried out on a sample from any source, e.g., cells, tissues, body fluids, blood, urine, stool, hair, egg, sperm, etc.

[0111] These methods can be implemented in many different ways. For example, “comparing the structure” steps include, but are not limited to, comparing restriction maps, nucleotide sequences, amino acid sequences, RFLPs, DNAse sites, DNA methylation fingerprints (e.g., U.S. Pat. No. 6,214,556), protein cleavage sites, molecular weights, electrophoretic mobilities, charges, ion mobility, etc., between a standard gene and a test gene. The term “structure” can refer to any physical characteristics or configurations which can be used to distinguish between nucleic acids and polypeptides. The methods and instruments used to accomplish the comparing step depends upon the physical characteristics which are to be compared. Thus, various techniques are contemplated, including, e.g., sequencing machines (both amino acid and polynucleotide), electrophoresis, mass spectrometer (U.S. Pat. Nos. 6,093,541, 6,002,127), liquid chromatography, HPLC, etc.

[0112] To carry out such methods, “all or part” of the gene or polypeptide can be compared. For example, if nucleotide sequencing is utilized, the entire gene can be sequenced, including promoter, introns, and exons, or only parts of it can be sequenced and compared, e.g., exon 1, exon 2, etc.

[0113] Mutagenesis

[0114] Mutated polynucleotide sequences of the present invention are useful for various purposes, e.g., to create mutations of the polypeptides they encode, to identify functional regions of genomic DNA, to produce probes for screening libraries, etc. Mutagenesis can be carried out routinely according to any effective method, e.g., oligonucleotide-directed (Smith, M., Ann. Rev. Genet. 19:423-463, 1985), degenerate oligonucleotide-directed (Hill et al., Method Enzymology, 155:558-568, 1987), region-specific (Myers et al., Science, 229:242-246, 1985; Derbyshire et al., Gene, 46:145, 1986; Ner et al., DNA, 7:127, 1988), linker-scanning (McKnight and Kingsbury, Science, 217:316-324, 1982), directed using PCR, recursive ensemble mutagenesis (Arkin and Yourvan, Proc. Natl. Acad. Sci., 89:7811-7815, 1992), random mutagenesis (e.g., U.S. Pat. Nos. 5,096,815; 5,198,346; and 5,223,409), site-directed mutagenesis (e.g., Walder et al., Gene, 42:133, 1986; Bauer et al., Gene, 37:73, 1985; Craik, Bio Techniques, January 1985, 12-19; Smith et al., Genetic Engineering: Principles and Methods, Plenum Press, 1981), phage display (e.g., Lowman et al., Biochem. 30:10832-10837, 1991; Ladner et al., U.S. Pat. No. 5,223,409; Huse, WIPO Publication WO 92/06204), etc. Desired sequences can also be produced by the assembly of target sequences using mutually priming oligonucleotides (Uhlmann, Gene, 71:29-40, 1988). For directed mutagenesis methods, analysis of the three-dimensional structure of the polypeptide can be used to guide and facilitate making mutants which effect polypeptide activity. Sites of substrate-enzyme interaction or other biological activities can also be determined by analysis of crystal structure as determined by such techniques as nuclear magnetic resonance, crystallography or photoaffinity labeling. See, for example, de Vos et al., Science 255:306-312, 1992; Smith et al., J. Mol. Biol. 224:899-904, 1992; Wlodaver et al., FEBS Lett. 309:59-64, 1992.

[0115] In addition, libraries of differentially-regulated genes and fragments thereof can be used for screening and selection of gene variants. For instance, a library of coding sequences can be generated by treating a double-stranded DNA with a nuclease under conditions where the nicking occurs, e.g., only once per molecule, denaturing the double-stranded DNA, renaturing it to for double-stranded DNA that can include sense/antisense pairs from different nicked products, removing single-stranded portions from reformed duplexes by treatment with S1 nuclease, and ligating the resulting DNAs into an expression vector. By this method, expression libraries can be made comprising “mutagenized” differentially-regulated genes. The entire coding sequence or parts thereof can be used.

[0116] Polynucleotide Expression, Polypeptides Produced Thereby, and Specific-Binding Partners Thereto.

[0117] A polynucleotide according to the present invention can be expressed in a variety of different systems, in vitro and in vivo, according to the desired purpose. For example, a polynucleotide can be inserted into an expression vector, introduced into a desired host, and cultured under conditions effective to achieve expression of a polypeptide coded for by the polynucleotide, to search for specific binding partners. Effective conditions include any culture conditions which are suitable for achieving production of the polypeptide by the host cell, including effective temperatures, pH, medium, additives to the media in which the host cell is cultured (e.g., additives which amplify or induce expression such as butyrate, or methotrexate if the coding polynucleotide is adjacent to a dhfr gene), cycloheximide, cell densities, culture dishes, etc. A polynucleotide can be introduced into the cell by any effective method including, e.g., naked DNA, calcium phosphate precipitation, electroporation, injection, DEAE-Dextran mediated transfection, fusion with liposomes, association with agents which enhance its uptake into cells, viral transfection. A cell into which a polynucleotide of the present invention has been introduced is a transformed host cell. The polynucleotide can be extrachromosomal or integrated into a chromosome(s) of the host cell. It can be stable or transient. An expression vector is selected for its compatibility with the host cell. Host cells include, mammalian cells, e.g., COS, CV1, BHK, CHO, HeLa, LTK, NIH 3T3, ZR-75-1 (ATCC CRL-1500), ZR-75-30 (ATCC CRL-1504), UACC-812 (ATCC CRL-1897), UACC-893 (ATCC CRL-1902), HCC38 (ATCC CRL-2314), HCC70 (CRL-2315), and other HCC cell lines (e.g., as deposited with the ATCC), AU565 (ATCC CRL-2351), Hs 496.T (ATCC CRL-7303), Hs 748.T (ATCC CRL-7486), SW527 (ATCC CRL-7940), 184AI (ATCC CRL-8798), MCF cell lines (e.g., 10A and others deposited with the ATCC), MDA-MB-134-VI (ATCC HTB-23 and other MDA cell lines), SK-BR-3 (ATCC HTB-30), ME-180 (ATCC HTB-33), Hs 578Bst (ATCC HTB-125), Hs 578T (ATCC HTB-126), T-47D (ATCC HTB-133), insect cells, such as Sf9 (S. frugipeda) and Drosophila, bacteria, such as E. coli, Streptococcus, bacillus, yeast, such as Sacharomyces, S. cerevisiae, fungal cells, plant cells, embryonic or adult stem cells (e.g., mammalian, such as mouse or human).

[0118] Expression control sequences are similarly selected for host compatibility and a desired purpose, e.g., high copy number, high amounts, induction, amplification, controlled expression. Other sequences which can be employed include enhancers such as from SV40, CMV, RSV, inducible promoters, cell-type specific elements, or sequences which allow selective or specific cell expression. Promoters that can be used to drive its expression, include, e.g., the endogenous promoter, MMTV, SV40, trp, lac, tac, or T7 promoters for bacterial hosts; or alpha factor, alcohol oxidase, or PGH promoters for yeast. RNA promoters can be used to produced RNA transcripts, such as T7 or SP6. See, e.g., Melton et al., PolynzicleotideRes., 12(18):7035-7056, 1984; Dunn and Studier. J. Mol. Bio., 166:477-435, 1984; U.S. Pat. No. 5,891,636; Studier et al., Gene Erpression Technology, Methocls in Enzymology, 85:60-89, 1987. In addition, as discussed above, translational signals (including in-frame insertions) can be included.

[0119] When a polynucleotide is expressed as a heterologous gene in a transfected cell line, the gene is introduced into a cell as described above, under effective conditions in which the gene is expressed. The term “heterologous” means that the gene has been introduced into the cell line by the “hand-of-man.” Introduction of a gene into a cell line is discussed above. The transfected (or transformed) cell expressing the gene can be lysed or the cell line can be used intact.

[0120] For expression and other purposes, a polynucleotide can contain codons found in a naturally-occurring gene, transcript, or cDNA, for example, e.g., as set forth in SEQ ID NOS 1, 3, 5, 7, 9, 11, 13, 15, 17, 19, 21, 23, 25, 27, 29, 31, 33, 35, 37, 39, 41, 43, 45, 47, 49, 51, 53, 55, 57, 59, 61, 63, 65, 67, 69, 71, 73, 75, 77, 79, 81, 83, 85, 87, 89, and 91, or it can contain degenerate codons coding for the same amino acid sequences. For instance, it may be desirable to change the codons in the sequence to optimize the sequence for expression in a desired host. See, e.g., U.S. Pat. Nos. 5,567,600 and 5,567,862.

[0121] A polypeptide according to the present invention can be recovered from natural sources, transformed host cells (culture medium or cells) according to the usual methods, including, detergent extraction (e.g., non-ionic detergent, Triton X-100, CHAPS, octylglucoside, Igepal CA-630), ammonium sulfate or ethanol precipitation, acid extraction, anion or cation exchange chromatography, phosphocellulose chromatography, hydrophobic interaction chromatography, hydroxyapatite chromatography, lectin chromatography, gel electrophoresis. Protein refolding steps can be used, as necessary, in completing the configuration of the mature protein. Finally, high performance liquid chromatography (HPLC) can be employed for purification steps. Another approach is express the polypeptide recombinantly with an affinity tag (Flag epitope, HA epitope, myc epitope, 6×His, maltose binding protein, chitinase, etc) and then purify by anti-tag antibody-conjugated affinity chromatography.

[0122] The present invention also relates to antibodies, and other specific-binding partners, which are specific for polypeptides encoded by polynucleotides of the present invention. Antibodies, e.g., polyclonal, monoclonal, recombinant, chimeric, humanized, single-chain, Fab, and fragments thereof, can be prepared according to any desired method. See, also, screening recombinant immunoglobulin libraries (e.g., Orlandi et al., Proc. Natl. Acad. Sci., 86:3833-3837, 1989; Huse et al., Science, 256:1275-1281, 1989); in vitro stimulation of lymphocyte populations; Winter and Milstein, Nature, 349: 293-299, 1991. The antibodies can be IgM, IgG, subtypes, IgG2a, IgG1, etc. Antibodies, and immune responses, can also be generated by administering naked DNA See, e.g., U.S. Pat. Nos. 5,703,055; 5,589,466; 5,580,859. Antibodies can be used from any source, including, goat, rabbit, mouse, chicken (e.g., IgY; see, Duan, WO/029444 for methods of making antibodies in avian hosts, and harvesting the antibodies from the eggs). An antibody specific for a polypeptide means that the antibody recognizes a defined sequence of amino acids within or including the polypeptide. Other specific binding partners include, e.g., aptamers and PNA, can be prepared against specific epitopes or domains of differentially regulated genes.

[0123] The preparation of polyclonal antibodies is well-known to those skilled in the art. See, for example, Green et al., Production of Polyclonal Antisera, in IMMUNOCHEMICAL PROTOCOLS (Manson, ed.), pages 1-5 (Humana Press 1992); Coligan et al., Production of Polyclonal Antisera in Rabbits, Rats, Mice and Hamsters, in CURRENT PROTOCOLS IN IMMUNOLOGY, section 2.4.1 (1992). The preparation of monoclonal antibodies likewise is conventional. See, for example, Kohler & Milstein, Nature 256:495 (1975); Coligan et al., sections 2.5.1-2.6.7; and Harlow et al., ANTIBODIES: A LABORATORY MANUAL, page 726 (Cold Spring Harbor Pub. 1988).

[0124] Antibodies can also be humanized, e.g., where they are to be used therapeutically. Humanized monoclonal antibodies are produced by transferring mouse complementarity determining regions from heavy and light variable chains of the mouse immunoglobulin into a human variable domain, and then substituting human residues in the framework regions of the murine counterparts. The use of-antibody components derived from humanized monoclonal antibodies obviates potential problems associated with the immunogenicity of murine constant regions. General techniques for cloning murine immunoglobulin variable domains are described, for example, by Orlandi et al., Proc. Nat'l Acad. Sci. USA 86:3833 (1989), which is hereby incorporated in its entirety by reference. Techniques for producing humanized monoclonal antibodies are described, for example, in U.S. Pat. No. 6,054,297, Jones et al., Nature 321: 522 (1986); Riechmann et al., Nature 332: 323 (1988); Verhoeyen et al., Science 239: 1534 (1988); Carter et al., Proc. Nat'l Acad. Sci. USA 89: 4285 (1992); Sandhu, Crit. Rev. Biotech. 12: 437 (1992); and Singer et al., J. Immunol. 150: 2844 (1993).

[0125] Antibodies of the invention also may be derived from human antibody fragments isolated from a combinatorial immunoglobulin library. See, for example, Barbas et al., METHODS: A COMPANION TO METHODS IN ENZYMOLOGY, VOL. 2, page 119 (1991); Winter et al., Ann. Rev. Immunol. 12: 433 (1994). Cloning and expression vectors that are useful for producing a human immunoglobulin phage library can be obtained commercially, for example, from STRATAGENE Cloning Systems (La Jolla, Calif.).

[0126] In addition, antibodies of the present invention may be derived from a human monoclonal antibody. Such antibodies are obtained from transgenic mice that have been “engineered” to produce specific human antibodies in response to antigenic challenge. In this technique, elements of the human heavy and light chain loci are introduced into strains of mice derived from embryonic stem cell lines that contain targeted disruptions of the endogenous heavy and light chain loci. The transgenic mice can synthesize human antibodies specific for human antigens and can be used to produce human antibody-secreting hybridomas. Methods for obtaining human antibodies from transgenic mice are described, e.g., in Green et al., Nature Genet. 7:13 (1994); Lonberg et al., Nature 368:856 (1994); and Taylor et al., Int. Immunol. 6:579 (1994).

[0127] Antibody fragments of the present invention can be prepared by proteolytic hydrolysis of the antibody or by expression in E. coli of nucleic acid encoding the fragment. Antibody fragments can be obtained by pepsin or papain digestion of whole antibodies by conventional methods. For example, antibody fragments can be produced by enzymatic cleavage of antibodies with pepsin to provide a 5S fragment denoted F(ab′).sub.2. This fragment can be further cleaved using a thiol reducing agent, and optionally a blocking group for the sulfhydryl groups resulting from cleavage of disulfide linkages, to produce 3.5S Fab′ monovalent fragments. Alternatively, an enzymatic cleavage using pepsin produces two monovalent Fab′ fragments and an Fe fragment directly. These methods are described, for example, by Goldenberg, U.S. Pat. No. 4,036,945 and No. 4,331,647, and references contained therein. These patents are hereby incorporated in their entireties by reference. See also Nisoiihoff et al., Arch. Biochem. Biophys. 89:230 (1960); Porter, Biochem. J. 73:119 (1959); Edelman et al, METHODS IN ENZYMOLOGY, VOL. 1, page 422 (Academic Press 1967); and Coligan et al. at sections 2.8.1-2.8.10 and 2.10.1-2.10.4.

[0128] Other methods of cleaving antibodies, such as separation of heavy chains to form monovalent light-heavy chain fragments, further cleavage of fragments, or other enzymatic, chemical, or genetic techniques can also be used. For example, Fv fragments comprise an association of V.sub.H and V.sub.L chains. This association may be noncovalent, as described in Inbar et al., Proc. Nat'l Acad. Sci. USA 69:2659 (1972). Alternatively, the variable chains can be linked by an intermolecular disulfide bond or cross-linked by chemicals such as glutaraldehyde. See, e.g., Sandhu, supra. Preferably, the Fv fragments comprise V.sub.H and V.sub.L chains connected by a peptide linker. These single-chain antigen binding proteins (sFv) are prepared by constructing a structural gene comprising nucleic acid sequences encoding the V.sub.H and V.sub.L domains connected by an oligonucleotide. The structural gene is inserted into an expression vector, which is subsequently introduced into a host cell such as E. coli. The recombinant host cells synthesize a single polypeptide chain with a linker peptide bridging the two V domains. Methods for producing sFvs are described, for example, by Whitlow et al., METHODS: A COMPANION TO METHODS IN ENZYMOLOGY, VOL. 2, page 97 (1991); Bird et al., Science 242:423-426 (1988); Ladneret al., U.S. Pat. No. 4,946,778; Pack et al., Bio/Technology 11: 1271-77 (1993); and Sandhu, supra.

[0129] Another form of an antibody fragment is a peptide coding for a single complementarity-determining region (CDR). CDR peptides (“minimal recognition units”) can be obtained by constructing genes encoding the CDR of an antibody of interest. Such genes are prepared, for example, by using the polymerase chain reaction to synthesize the variable region from RNA of antibody-producing cells. See, for example, Larrick et al., METHODS: A COMPANION TO METHODS IN ENZYMOLOGY, VOL. 2, page 106 (1991).

[0130] The term “antibody” as used herein includes intact molecules as well as fragments thereof, such as Fab, F(ab′)₂, and Fv which are capable of binding to an epitopic determinant present in BinI polypeptide. Such antibody fragments retain some ability to selectively bind with its antigen or receptor. The term “epitope” refers to an antigenic determinant on an antigen to which the paratope of an antibody binds. Epitopic determinants usually consist of chemically active surface groupings of molecules such as amino acids or sugar side chains and usually have specific three dimensional structural characteristics, as well as specific charge characteristics. Antibodies can be prepared against specific epitopes or polypeptide domains.

[0131] Antibodies which bind to a differentially-regulated polypeptide of the present invention can be prepared using an intact polypeptide or fragments containing small peptides of interest as the immunizing antigen. For example, it may be desirable to produce antibodies that specifically bind to the N- or C-terminal domains of said polypeptide. The polypeptide or peptide used to immunize an animal which is derived from translated cDNA or chemically synthesized which can be conjugated to a carrier protein, if desired. Such commonly used carriers which are chemically coupled to the immunizing peptide include keyhole limpet hemocyanin (KLH), thyroglobulin, bovine serum albumin (BSA), and tetanus toxoid.

[0132] Polyclonal or monoclonal antibodies can be further purified, for example, by binding to and elution from a matrix to which the polypeptide or a peptide to which the antibodies were raised is bound. Those of skill in the art will know of various techniques common in the immunology arts for purification and/or concentration of polyclonal antibodies, as well as monoclonal antibodies (See for example, Coligan, et al., Unit 9, Current Protocols in Immunology, Wiley Interscience, 1994, incorporated by reference).

[0133] Anti-idiotype technology can also be used to produce invention monoclonal antibodies which mimic an epitope. For example, an anti-idiotypic monoclonal antibody made to a first monoclonal antibody will have a binding domain in the hypervariable region which is the “image” of the epitope bound by the first monoclonal antibody.

[0134] Methods of Detecting Polypeptides

[0135] Polypeptides coded for by a differentially-regulated gene of the present invention can be detected, visualized, determined, quantitated, etc. according to any effective method. useful methods include, e.g., but are not limited to, immunoassays, RIA (radioimmunassay), ELISA, (enzyme-linked-immunosorbent assay), immunoflourescence, flow cytometry, histology, electron microscopy, light microscopy, in situ assays, immunoprecipitation, Western blot, etc.

[0136] Immunoassays may be carried in liquid or on biological support. For instance, a sample (e.g., blood, stool, urine, cells, tissue, body fluids, etc.) can be brought in contact with and immobilized onto a solid phase support or carrier such as nitrocellulose, or other solid support that is capable of immobilizing cells, cell particles or soluble proteins. The support may then be washed with suitable buffers followed by treatment with the detectably labeled differentially-regulated gene specific antibody. The solid phase support can then be washed with a buffer a second time to remove unbound antibody. The amount of bound label on solid support may then be detected by conventional means.

[0137] A “solid phase support or carrier” includes any support capable of binding an antigen, antibody, or other specific binding partner. Supports or carriers include glass, polystyrene, polypropylene, polyethylene, dextran, nylon, amylases, natural and modified celluloses, polyacrylamides, and magnetite. A support material can have any structural or physical configuration. Thus, the support configuration may be spherical, as in a bead, or cylindrical, as in the inside surface of a test tube, or the external surface of a rod. Alternatively, the surface may be flat such as a sheet, test strip, etc. Preferred supports include polystyrene beads

[0138] One of the many ways in which gene peptide-specific antibody can be detectably labeled is by linking it to an enzyme and using it in an enzyme immunoassay (EIA). See, e.g., Voller, A., “The Enzyme Linked Immunosorbent Assay (ELISA),” 1978, Diagnostic Horizons 2, 1-7, Microbiological Associates Quarterly Publication, Walkersville, Md.); Voller, A. et al., 1978, J. Clin. Pathol. 31, 507-520; Butler, J. E., 1981, Meth. Enzymol. 73, 482-523; Maggio, E. (ed.), 1980, Enzyme Immunoassay, CRC Press, Boca Raton, Fla. The enzyme which is bound to the antibody will react with an appropriate substrate, preferably a chromogenic substrate, in such a manner as to produce a chemical moiety that can be detected, for example, by spectrophotometric, fluorimetric or by visual means. Enzymes that can be used to detectably label the antibody include, but are not limited to, malate dehydrogenase, staphylococcal nuclease, delta-5-steroid isomerase, yeast alcohol dehydrogenase, .alpha.-glycerophosphate, dehydrogenase, triose phosphate isomerase, horseradish peroxidase, alkaline phosphatase, asparaginase, glucose oxidase, beta.-galactosidase, ribonuclease, urease, catalase, glucose-6-phosphate dehydrogenase, glucoamylase and acetylcholinesterase. The detection can be accomplished by colorimetric methods that employ a chromogenic substrate for the enzyme. Detection may also be accomplished by visual comparison of the extent of enzymatic reaction of a substrate in comparison with similarly prepared standards.

[0139] Detection may also be accomplished using any of a variety of other immunoassays. For example, by radioactively labeling the antibodies or antibody fragments, it is possible to detect differentially-regulated peptides through the use of a radioimmunoassay (RIA). See, e.g., Weintraub, B., Principles of Radioimmunoassays, Seventh Training Course on Radioligand Assay Techniques, The Endocrine Society, March, 1986. The radioactive isotope can be detected by such means as the use of a gamma counter or a scintillation counter or by autoradiography.

[0140] It is also possible to label the antibody with a fluorescent compound. When the fluorescently labeled antibody is exposed to light of the proper wave length, its presence can then be detected due to fluorescence. Among the most commonly used fluorescent labeling compounds are fluorescein isothiocyanate, rhodamine, phycoerythrin, phycocyanin, allophycocyanin, o-phthaldehyde and fluorescamine. The antibody can also be detectably labeled using fluorescence emitting metals such as those in the lanthamide series. These metals can be attached to the antibody using such metal chelating groups as diethylenetriaminepentacetic acid (DTPA) or ethylenediaminetetraacetic acid (EDTA).

[0141] The antibody also can be detectably labeled by coupling it to a chemiluminescent compound. The presence of the chemiluminescent-tagged antibody is then determined by detecting the presence of luminescence that arises during the course of a chemical reaction. Examples of useful chemiluminescent labeling compounds are luminol, isoluminol, theromatic acridinium ester, imidazole, acridinium salt and oxalate ester.

[0142] Likewise, a bioluminescent compound may be used to label the antibody of the present invention. Bioluminescence is a type of chemiluminescence found in biological systems in which a catalytic protein increases the efficiency of the chemiluminescent reaction. The presence of a bioluminescent protein is determined by detecting the presence of luminescence. Important bioluminescent compounds for purposes of labeling are luciferin, luciferase and aequorin.

[0143] Tissue and Disease

[0144] The normal female breast comprises ducts and lobuloalveolar structures surrounded by basement membranes and collagenous stroma with fibroblasts, vessels, and fat. The basic unit of function in the breast are the lobuloalveolar structures which produce the milk secretions. Each lobule drains into a lactiferous duct that empties into a lactiferous sinus beneath the nipple. The ducts are lined with epithelial cells, containing few mitochondria and sparse endoplasmic reticulum. The lobules contain luminal epithelial cells, basal epithelial cells, and myoepithelial cells. The basal and epithelial cells are sometimes grouped together. The luminal cells can be differentiated immuno-histochemically from the myoepithelial cells by their expression of keratins. The luminal cells stain with antibodies to keratin ⅚; the myoepithelial cells stains with antibodies against keratin 8/18. In addition to the presence of these cells types in the breast, there are endothelial cells associated with blood vessels, stromal cells that surround the lobular structures, adipose cells, and blood cells, such as T-lymphocytes and macrophages.

[0145] Breast carcinoma can be classified into two basic types, noninvasive (non-infiltrating) and invasive. Noninvasive carcinoma includes, e.g., intraductal carcinoma (also known as ductal carcinoma in situ or “DCIS”), intraductal papillary carcinoma, and lobular carcinoma in situ. Invasive carcinoma includes, e.g., invasive ductal carcinoma (“IDC”), invasive lobular carcinoma, medullary carcinoma, colloid carcinoma (mucinous carcinoma), Paget's disease, tubular carcinoma, adenoid cystic carcinoma, invasive comedocarcinoma, apocrine carcinoma, and invasive papillary carcinoma. See, also, Cancer, Principles and Practice of Oncology, DeVita et al., ed., J. B. Lippincott Company, 1982, Pages 914-922. The different cancers can generally be distinguished histologically from each other.

[0146] Over 90% of breast cancers arise in the ducts. As long as it remains with the ductal basement membranes, it is classified as a non-infiltrating or non-invasive carcinoma. DCIS is a common example. An invasive or infiltrating carcinoma shows a marked increase in dense fibrous tissue stroma, giving the tissue a hard consistency. IDC is one of the more common types of an invasive carcinoma. Frequently, an infiltrating carcinoma becomes invaded with blood and lymphatic vessels as it increases in size and malignancy. The tumor cells fill the ducts, plugging them, and invade the surrounding stroma. For general description of breast pathology, see, e.g., Robins Pathological Basis of Disease, Cotran et al., 4^{th} Edition, W. B. Saunders Company, 1989, Chapter 25.

[0147] The progression of a cancer, from its origin to a full-blown malignancy, is the subject of intense study. Hyperplasia is generally believed to precede at least some cancers, but not all hyperplasia leads to cancer, and the relationship between the two is not well understood. One hallmark of a hyperplasia that leads to cancer may be the occurrence of genomic instability, and other factors which lead to uncoupling of the cell cycle.

[0148] Intraepithelial neoplasia is one of the first detectable signs of a breast cancer, characterized by its confinement to the duct epithelia. It can also be referred to as preinvasive neoplasia, precancer, dysplasia, or CIS. See, e.g., Boone et al., Proc. Soc. Exp. Biol. Med., 216:151-165, 1997. An intraepithelial neoplasia generally consists of multiple foci of an abnormal clonal expansion of neoplastic cells. The development of the neoplasia is manifested by an increasing size of the lesion and a greater degree of cytonuclear morphological aberration, as it progresses from low grade to high grade. See, e.g., Bacus et al., Cancer Epid. Biom. Prevent., 8:1087-1094, 1999. An early grade can be referred to as an intraductal proliferation (IDP). More advanced, pre-invasive lesions are DCIS and LCIS (lobular carcinoma in situ). It is believed that DCIS and LCIS are precursor lesions of invasive breast cancer, such as IDC. See, e.g., Buerger et al., Mol. Pathol., 53:118-121, 2000.

[0149] Breast cancers can be both staged and graded. Stage is based on the tumor and size and whether the lymph nodes are involved with the tumor. Tumor grade refers to the tumor cells' appearance under the microscope, and how closely it resembles normal tissue of the same type. If the tumor cells look normal, then it can be termed “low grade.” High grade cells look markedly different from normal cells. High grade tumors tend to behave more aggressively than lower grade. An “ungraded” cancer indicates that the gene expression profile as described herein indicates that it has an expression profile of group DI genes.

[0150] The most widely used clinical staging system for breast cancer is one adopted by the UICC (International Union against Cancer). This system incorporates the TNM (t, tumor; N, nodes; M, metastases) classification using tumor size, involvement of the chest wall and skin, inflammatory cancer, involvement of nodes, evidence of metastases. See, e.g., Sainsbury et al., BMJ, 321:745-750, 2000. Other staging and grading systems can also be used, e.g., Bloom and Richardson grade (British J. Cancer, 11:359-377, 1957), Columbia Clinical Classification (CCC), Van Nuys (VN), etc. Grading systems have also been devised based on image analysis of neoplastic and normal cells. Bacus et al. (Cancer Epid. Bioni. Prevent., 8:1087-1094, 1999) have described an image morphometric nuclear grading system for intraepitheliam neoplastic lesions, such as DCIS, which provides objective criteria to assess tumor grade. See, also, Schwartz, Human Pathol., 28:1798-1802, 1997, for a grading system for DCIS. FISH has also been used to diagnose cancers based on chromosomal aberrations. See, e.g., Komoike et al., Breast Cancer, 7:332-336, 2000.

[0151] Various genetic bases for breast cancer have begun to be identified. For instance, BRCA1, BRCA2, ATM, PTEN/MMAC1 (e.g., Ali et al., J. Natl. Cancer Inst., 91:1922-1932, 1999), MLH2, MSH2, TP53 (e.g., Done et al., Cancer Res., 58:785-789, 1998), and STK11 are associated with a higher risk of cancer. Other genes involved in breast cancer include, e.g., myc, cyclin D1 (e.g., Weinstat-Saslow et al., Nature Med., 1: 1257-1260, 1995), and c-erb-B2.

[0152] Grading, Staging, Comparing, Assessing, Methods and Compositions

[0153] The present invention also relates to methods and compositions for staging and grading cancers. As already defined, staging relates to determining the extent of a cancer's spread, including its size and the degree to which other tissues, such as lymph nodes are involved in the cancer. Grading refers to the degree of a cell's retention of the characteristics of the tissue of its origin. A lower grade cancer comprises tumor cells that more closely resemble normal cells than a medium or higher grade cancer. Grading can be a useful diagnostic and prognostic tool. Higher grade cancers usually behave more aggressively than lower grade cancers. Thus, knowledge of the cancer grade, as well as its stage, can be a significant factor in the choice of the appropriate therapeutic intervention for the particular patient, e.g., surgery, radiation, chemotherapy, etc. Staging and grading can also be used in conjunction with a therapy to assess its efficacy, to determine prognosis, to determine effective dosages, etc.

[0154] Various methods of staging and grading cancers can be employed in accordance with the present invention. A “cell expression profile” or “cell expression fingerprint” is a representation of the expression of various different genes in a given cell or sample comprising cells. These cell expression profiles can be useful as reference standards. The cell expression fingerprints can be used alone for grading, or in combination with other grading methods.

[0155] The present invention also relates to methods and compositions for diagnosing a breast cancer, or determining susceptibility to a breast cancer, using polynucleotides, polypeptides, and specific-binding partners of the present invention to detect, assess, determine, etc., differentially-regulated genes of the present invention. In such methods, the gene can serve as a marker for breast cancer, e.g., where the gene, when mutant, is a direct cause of the breast cancer; where the gene is affected by another gene(s) which is directly responsible for the breast cancer, e.g., when the gene is part of the same signaling pathway as the directly responsible gene; and, where the gene is chromosomally linked to the gene(s) directly responsible for the breast cancer, and segregates with it. Many other situations are possible. To detect, assess, determine, etc., a probe specific for the gene can be employed as described above and below. Any method of detecting and/or assessing the gene can be used, including detecting expression of the gene using polynucleotides, antibodies, or other specific-binding partners.

[0156] The present invention relates to methods of diagnosing a disorder associated with breast cancer, or determining a subject's susceptibility to breast cancer, comprising, e.g., assessing the expression of a differentially-regulated gene in a tissue sample comprising tissue or cells suspected of having a breast cancer (e.g., where the sample comprises breast tissue). The phrase “diagnosing” indicates that it is determined whether the sample has a breast cancer. “Determining a subject's susceptibility to a breast cancer” indicates that the subject is assessed for whether s/he is predisposed to get such a disease or disorder, where the predisposition is indicated by abnormal expression of the gene (e.g., gene mutation, gene expression pattern is not normal, etc.). Predisposition or susceptibility to a disease may result when a such disease is influenced by epigenetic, environmental, etc., factors. This includes prenatal screening where samples from the fetus or embryo (e.g., via amniocentesis or CV sampling) are analyzed for the expression of the genes.

[0157] By the phrase “assessing expression of a differentially-regulated gene,” it is meant that the functional status of the gene is evaluated. This includes, but is not limited to, measuring expression levels of said gene, determining the genomic structure of said gene, determining the mRNA structure of transcripts from said gene, or measuring the expression levels of polypeptide coded for by said gene. Thus, the term “assessing expression” includes evaluating the all aspects of the transcriptional and translational machinery of the gene. For instance, if a promoter defect causes, or is suspected of causing, the disorder, then a sample can be evaluated (i.e., “assessed”) by looking (e.g., sequencing or restriction mapping) at the promoter sequence in the gene, by detecting transcription products (e.g., RNA), by detecting translation product (e.g., polypeptide). Any measure of whether the gene is functional can be used, including, polypeptide, polynucleotide, and functional assays for the gene's biological activity.

[0158] In making the assessment, it can be useful to compare the results to a normal gene, e.g., a gene which is not associated with the disorder. The nature of the comparison can be determined routinely, depending upon how the assessing is accomplished. If, for example, the mRNA levels of a sample is detected, then the mRNA levels of a normal can serve as a comparison, or a gene which is known not to be affected by the disorder. Methods of detecting mRNA are well known, and discussed above, e.g., but not limited to, Northern blot analysis, polymerase chain reaction (PCR), reverse transcriptase PCR, RACE PCR, etc. Similarly, if polypeptide production is used to evaluate the gene, then the polypeptide in a normal tissue sample can be used as a comparison, or, polypeptide from a different gene whose expression is known not to be affected by the disorder. These are only examples of how such a method could be carried out.

[0159] Assessing the effects of therapeutic and preventative interventions (e.g., administration of a drug, chemotherapy, radiation, etc.) on breast cancer is a major effort in drug discovery, clinical medicine, and pharmacogenomics. The evaluation of therapeutic and preventative measures, whether experimental or already in clinical use, has broad applicability, e.g., in clinical trials, for monitoring the status of a patient, for analyzing and assessing animal models, and in any scenario involving cancer treatment and prevention. Analyzing the expression profiles of polynucleotides of the present invention can be utilized as a parameter by which interventions are judged and measured. Treatment of a disorder can change the expression profile in some manner which is prognostic or indicative of the drug's effect on it. Changes in the profile can indicate, e.g., drug toxicity, return to a normal level, etc. Accordingly, the present invention also relates to methods of monitoring or assessing a therapeutic or preventative measure (e.g., chemotherapy, radiation, anti-neoplastic drugs, antibodies, etc.) in a subject having breast cancer, or, susceptible to such a disorder, comprising, e.g., detecting the expression levels of one or more differentially-regulated genes of the present invention. A subject can be a cell-based assay system, non-human animal model, human patient, etc. Detecting can be accomplished as described for the methods above and below. By “therapeutic or preventative intervention,” it is meant, e.g., a drug administered to a patient, surgery, radiation, chemotherapy, and other measures taken to prevent, treat, or diagnose breast cancer.

[0160] Expression can be assessed in any sample comprising any tissue or cell type, body fluid, etc., as discussed for other methods of the present invention, including cells from breast cancer can be used, or cells derived from breast cancer. By the phrase “cells derived from breast cancer,” it is meant that the derived cells originate from breast cancer, e.g., when metastasis from a primary tumor site has occurred, when a progenitor-type or pluripotent cell gives rise to other cells, etc.

[0161] The present invention also relates to methods of using binding partners for differentially-regulated genes, such as antibodies, to deliver active agents to the breast for a variety of different purposes, including, e.g., for diagnostic, therapeutic (e.g., to treat cancer), and research purposes. Methods can involve delivering or administering an active agent to the breast cancer, comprising, e.g., administering to a subject in need thereof, an effective amount of an active agent coupled to a binding partner specific for a differentially-regulated gene polypeptide, wherein said binding partner is effective to deliver said active agent specifically to breast cancer.

[0162] Any type of active agent can be used in combination with the binding partner, including, therapeutic, cytotoxic, cytostatic, chemotherapeutic, anti-neoplasti c, anti-proliferative, anti-biotic, etc., agents. A chemotherapeutic agent can be, e.g., DNA-interactive agent, alkylating agent, antimetabolite, tubulin-interactive agent, hormonal agent, hydroxyurea, Cisplatin, Cyclophosphamide, Altretamine, Bleomycin, Dactinomycin, Doxorubicin, Etoposide, Teniposide, paclitaxel, cytoxan, 2-methoxycarbonylaminobenzimidazole, Plicamycin, Methotrexate, Fluorouracil, Fluorodeoxyuridin, CB3717, Azacitidine, Floxuridine, Mercapyopurine, 6-Thioguanine, Pentostatin, Cytarabine, Fludarabine, etc. Agents can also be contrast agents useful in imaging technology, e.g., X-ray, CT, CAT, MRI, ultrasound, PET, SPECT, and scintographic.

[0163] An active agent can be associated in any manner with a binding partner which is effective to achieve its delivery specifically to the target. Specific delivery or targeting indicates that the agent is provided to the breast cancer, without being substantially provided to other tissues. This is useful especially where an agent is toxic, and specific targeting to the breast cancer enables the majority of the toxicity to be aimed at the breast cancer, with as small as possible effect on other tissues in the body. The association of the active agent and the binding partner (“coupling) can be direct, e.g., through chemical bonds between the binding partner and the agent, or, via a linking agent, or the association can be less direct, e.g., where the active agent is in a liposome, or other carrier, and the binding partner is associated with the liposome surface. In such case, the binding partner can be oriented in such a way that it is able to bind to the gene product on breast cell surface. Methods for delivery of DNA via a cell-surface receptor is described, e.g., in U.S. Pat. No. 6,339,139.

[0164] Identifying Agent Methods

[0165] The present invention also relates to methods of identifying agents, and the agents themselves, which modulate differentially regulated genes and gene products of the present invention. These agents can be used to modulate the biological activity of the polypeptide encoded for the gene, or the gene, itself. Agents which regulate the gene or its product are useful in variety of different environments, including as medicinal agents to treat or prevent disorders associated with differentially regulated genes and as research reagents to modify the function of tissues and cell.

[0166] Methods of identifying agents generally comprise steps in which an agent is placed in contact with the gene, transcription product, translation product, or other target, and then a determination is performed to assess whether the agent “modulates” the target. The specific method utilized will depend upon a number of factors, including, e.g., the target (i.e., is it the gene or polypeptide encoded by it), the environment (e.g., in vitro or in vivo), the composition of the agent, etc.

[0167] For modulating the expression of differentially-regulated genes of the present invention, a method can comprise, in any effective order, one or more of the following steps, e.g., contacting a differentially-regulated gene (e.g., in a cell population) with a test agent under conditions effective for said test agent to modulate the expression of said gene, and determining whether said test agent modulates said gene. An agent can modulate expression of a differentially-regulated gene at any level, including transcription, translation, and/or perdurance of the nucleic acid (e.g., degradation, stability, etc.) in the cell. For modulating the biological activity of polypeptides coded for by differentially-regulated genes, a method can comprise, in any effective order, one or more of the following steps, e.g., contacting a polypeptide (e.g., in a cell, lysate, or isolated) with a test agent under conditions effective for said test agent to modulate the biological activity of said polypeptide, and determining whether said test agent modulates said biological activity.

[0168] Contacting a differentially-regulated gene or polypeptide with the test agent can be accomplished by any suitable method and/or means that places the agent in a position to functionally control expression or biological activity of said gene or polypeptide present in the sample. Functional control indicates that the agent can exert its physiological effect on the gene or polypeptide through whatever mechanism it works. The choice of the method and/or means can depend upon the nature of the agent and the condition and type of environment in which the gene or polypeptide is presented, e.g., lysate, isolated, or in a cell population (such as, in vivo, in vitro, organ explants, etc.). For instance, if the cell population is an in vitro cell culture, the agent can be contacted with the cells by adding it directly into the culture medium. If the agent cannot dissolve readily in an aqueous medium, it can be incorporated into liposomes, or another lipophilic carrier, and then administered to the cell culture. Contact can also be facilitated by incorporation of agent with carriers and delivery molecules and complexes, by injection, by infusion, etc.

[0169] After the agent has been administered in such a way that it can gain access to the gene or polypeptide, it can be determined whether the test agent modulates their expression or biological activity. Modulation can be of any type, quality, or quantity, e.g., increase, facilitate, enhance, up-regulate, stimulate, activate, amplify, augment, induce, decrease, down-regulate, diminish, lessen, reduce, etc. The modulatory quantity can also encompass any value, e.g., 1%, 5%, 10%, 50%, 75%, 1-fold, 2-fold, 5-fold, 10-fold, 100-fold, etc. To modulate gene expression means, e.g., that the test agent has an effect on its expression, e.g., to effect the amount of transcription, to effect RNA splicing, to effect translation of the RNA into polypeptide, to effect RNA or polypeptide stability, to effect polyadenylation or other processing of the RNA, to effect post-transcriptional or post-translational processing, etc. To modulate biological activity means, e.g., that a functional activity of the polypeptide is changed in comparison to its normal activity in the absence of the agent. This effect includes, increase, decrease, block, inhibit, enhance, etc.

[0170] A test agent can be of any molecular composition, e.g., chemical compounds, biomolecules, such as polypeptides, lipids, nucleic acids (e.g., antisense to a polynucleotide sequence selected from SEQ ID NOS 1, 3, 5, 7, 9, 11, 13, 15, 17, 19, 21, 23, 25, 27, 29, 31, 33, 35, 37, 39, 41, 43, 45, 47, 49, 51, 53, 55, 57, 59, 61, 63, 65, 67, 69, 71, 73, 75, 77, 79, 81, 83, 85, 87, 89, and 91), carbohydrates, antibodies, ribozymes, double-stranded RNA, aptamers, etc. For example, if a polypeptide to be modulated is a cell-surface molecule, a test agent can be an antibody that specifically recognizes it and, e.g., causes the polypeptide to be internalized, leading to its down regulation on the surface of the cell. Such an effect does not have to be permanent, but can require the presence of the antibody to continue the down-regulatory effect. Antibodies can also be used to modulate the biological activity a polypeptide in a lysate or other cell-free form. Antisense can also be used as test agents to modulate gene expression.

[0171] Markers

[0172] The polynucleotides of the present invention can be used with other markers, especially breast and breast cancer markers to identity, detect, stage, diagnosis, determine, prognosticate, treat, etc., tissue, diseases and conditions, etc, of the breast. Markers can be polynucleotides, polypeptides, antibodies, ligands, specific binding partners, etc. The targets for such markers include, but are not limited genes and polypeptides that are selective for cell types present in the breast. Specific targets include, BRCA 1, BRCA2, ATM, PTEN/MMAC1 (e.g., Ali et al., J. Natl. Cancer Inst., 91:1922-1932, 1999), MLH2, MSH2, TP53 (e.g., Done et al., Cancer Res., 58:785-789, 1998), STK11, myc, cyclin D1 (e.g., Weinstat-Saslow et al., Nature Med., 1: 1257-1260, 1995), c-erb-B2, keratins, such as 5/6and 8/18.

[0173] Therapeutics

[0174] Selective polynucleotides, polypeptides, and specific-binding partners thereto, can be utilized in therapeutic applications, especially to treat breast cancer. Useful methods include, but are not limited to, immunotherapy (e.g., using specific-binding partners to polypeptides), vaccination (e.g., using a selective polypeptide or a naked DNA encoding such polypeptide), protein or polypeptide replacement therapy, gene therapy (e.g., germ-line correction, antisense), etc.

[0175] Various immunotherapeutic approaches can be used. For instance, unlabeled antibody that specifically recognizes a tissue-specific antigen can be used to stimulate the body to destroy or attack the cancer, to cause down-regulation, to produce complement-mediated lysis, to inhibit cell growth, etc., of target cells which display the antigen, e.g., analogously to how c-erbB-2 antibodies are used to treat breast cancer. In addition, antibody can be labeled or conjugated to enhance its deleterious effect, e.g., with radionuclides and other energy emitting entitities, toxins, such as ricin, exotoxin A (ETA), and diphtheria, cytotoxic or cytostatic agents, immunomodulators, chemotherapeutic agents, etc. See, e.g., U.S. Pat. No. 6,107,090.

[0176] An antibody or other specific-binding partner can be conjugated to a second molecule, such as a cytotoxic agent, and used for targeting the second molecule to a tissue-antigen positive cell (Vitetta, E. S. et al., 1993, Immunotoxin therapy, in DeVita, Jr., V. T. et al., eds, Cancer: Principles and Practice of Oncology, 4th ed., J. B. Lippincott Co., Philadelphia, 2624-2636). Examples of cytotoxic agents include, but are not limited to, antimetabolites, alkylating agents, anthracyclines, antibiotics, anti-mitotic agents, radioisotopes and chemotherapeutic agents. Further examples of cytotoxic agents include, but are not limited to ricin, doxorubicin, daunorubicin, taxol, ethidium bromide, mitomycin, etoposide, tenoposide, vincristine, vinblastine, colchicine, dihydroxy anthracin dione, actinomycin D, 1-dehydrotestosterone, diptheria toxin, Pseudomonas exotoxin (PE) A, PE40, abrin, elongation factor-2 and glucocorticoid. Techniques for conjugating therapeutic agents to antibodies are well.

[0177] In addition to immunotherapy, polynucleotides and polypeptides can be used as targets for non-immunotherapeutic applications, e.g., using compounds which interfere with function, expression (e.g., antisense as a therapeutic agent), assembly, etc. RNA interference can be used in vivtro and in vivo to silence differentially-expressed genes when its expression contributes to a disease (but also for other purposes, e.g., to identify the gene's function to change a developmental pathway of a cell, etc.). See, e.g., Sharp and Zamore, Science, 287:2431-2433, 2001; Grishok et al., Science, 287:2494, 2001.

[0178] Delivery of therapeutic agents can be achieved according to any effective method, including, liposomes, viruses, plasmid vectors, bacterial delivery systems, orally, systemically, etc. Therapeutic agents of the present invention can be administered in any form by any effective route, including, e.g., oral, parenteral, enteral, intraperitoneal, topical, transdermal (e.g., using any standard patch), ophthalmic, nasally, local, non-oral, such as aerosal, inhalation, subcutaneous, intramuscular, buccal, sublingual, rectal, vaginal, intraarterial, and intrathecal, etc. They can be administered alone, or in combination with any ingredient(s), active or inactive.

[0179] In addition to therapeutics, per se, the present invention also relates to methods of treating breast cancer showing altered expression of differentially-regulated genes, such as SEQ ID NOS 1-92, comprising, e.g., administering to a subject in need thereof a therapeutic agent which is effective for regulating expression of said genes and/or which is effective in treating said disease. The term “treating” is used conventionally, e.g., the management or care of a subject for the purpose of combating, alleviating, reducing, relieving, improving the condition of, etc., of a disease or disorder. By the phrase “altered expression,” it is meant that the disease is associated with a mutation in the gene, or any modification to the gene (or corresponding product) which affects its normal function. Thus, expression of a differentially-regulated gene refers to, e.g., transcription, translation, splicing, stability of the mRNA or protein product, activity of the gene product, differential expression, etc.

[0180] Any agent which “treats” the disease can be used. Such an agent can be one which regulates the expression of the gene. Expression refers to the same acts already mentioned, e.g. transcription, translation, splicing, stability of the mRNA or protein product, activity of the gene product, differential expression, etc. For instance, if the condition was a result of a complete deficiency of the gene product, administration of gene product to a patient would be said to treat the disease and regulate the gene's expression. Many other possible situations are possible, e.g., where the gene is aberrantly expressed, and the therapeutic agent regulates the aberrant expression by restoring its normal expression pattern.

[0181] Antisense

[0182] Antisense polynucleotide (e.g., RNA) can also be prepared from a polynucleotide according to the present invention, preferably an anti-sense to a sequence of SEQ ID NOS 1, 3, 5, 7, 9, 11, 13, 15, 17, 19, 21, 23, 25, 27, 29, 31, 33, 35, 37, 39, 41, 43, 45, 47, 49, 51, 53, 55, 57, 59, 61, 63, 65, 67, 69, 71, 73, 75, 77, 79, 81, 83, 85, 87, 89, and 91. Antisense polynucleotide can be used in various ways, such as to regulate or modulate expression of the polypeptides they encode, e.g., inhibit their expression, for in situ hybridization, for therapeutic purposes, for making targeted mutations (in vivo, triplex, etc.) etc. For guidance on administering and designing anti-sense, see, e.g., U.S. Pat. Nos. 6,200,960, 6,200,807, 6,197,584, 6,190,869, 6,190,661, 6,187,587, 6,168,950, 6,153,595, 6,150,162, 6,133,246, 6,117,847, 6,096,722, 6,087,343, 6,040,296, 6,005,095, 5,998,383, 5,994,230, 5,891,725, 5,885,970, and 5,840,708. An antisense polynucleotides can be operably linked to an expression control sequence. A total length of about 35 bp can be used in cell culture with cationic liposomes to facilitate cellular uptake, but for in vivo use, preferably shorter oligonucleotides are administered, e.g. 25 nucleotides.

[0183] Antisense polynucleotides can comprise modified, normaturally-occurring nucleotides and linkages between the nucleotides (e.g., modification of the phosphate-sugar backbone; methyl phosphonate, phosphorothioate, or phosphorodithioate linkages; and 2′-O-methyl ribose sugar units), e.g., to enhance in vivo or in vitro stability, to confer nuclease resistance, to modulate uptake, to modulate cellular distribution and compartmentalization, etc. Any effective nucleotide or modification can be used, including those already mentioned, as known in the art, etc., e.g., disclosed in U.S. Pat. Nos. 6,133,438; 6,127,533; 6,124,445; 6,121,437; 5,218,103 (e.g., nucleoside thiophosphoramidites); 4,973,679; Sproat et al., “2′-O-Methyloligoribonucleotides: synthesis and applications,” Oligonucleotides and Analogs A Practical Approach, Eckstein (ed.), IRL Press, Oxford, 1991, 49-86; Iribarren et al., “2′O-Alkyl Oligoribonucleotides as Antisense Probes,” Proc. Natl. Acad. Sci. USA, 1990, 87, 7747-7751; Cotton et al., “2′-O-methyl, 2′-O-ethyl oligoribonucleotides and phosphorothioate oligodeoxyribonucleotides as inhibitors of the in vitro U7 snRNP-dependent mRNA processing event,” Nucl. Acids Res., 1991, 19, 2629-2635.

[0184] Arrays

[0185] The present invention also relates to an ordered array of polynucleotide probes and specific-binding partners (e.g., antibodies) for detecting the expression of differentially-regulated genes in a sample, comprising, one or more polynucleotide probes or specific binding partners associated with a solid support, wherein each probe is specific for said genes, and the probes comprise a nucleotide sequence of SEQ ID NOS 1, 3, 5, 7, 9, 11, 13, 15, 17, 19, 21, 23, 25, 27, 29, 31, 33, 35, 37, 39, 41, 43, 45, 47, 49, 51, 53, 55, 57, 59, 61, 63, 65, 67, 69, 71, 73, 75, 77, 79, 81, 83, 85, 87, 89, and 91 which is specific for said gene, a nucleotide sequence having sequence identity to SEQ ID NOS 1, 3, 5, 7, 9, 11, 13, 15, 17, 19, 21, 23, 25, 27, 29, 31, 33, 35, 37, 39, 41, 43, 45, 47, 49, 51, 53, 55, 57, 59, 61, 63, 65, 67, 69, 71, 73, 75, 77, 79, 81, 83, 85, 87, 89, and 91 which is specific for said gene or polynucleotide, or complements thereto, or a specific-binding partner which is specific for said genes.

[0186] The phrase “ordered array” indicates that the probes are arranged in an identifiable or position-addressable pattern, e.g., such as the arrays disclosed in U.S. Pat. Nos. 6,156,501, 6,077,673, 6,054,270, 5,723,320, 5,700,637, WO09919711, WO00023803. The probes are associated with the solid support in any effective way. For instance, the probes can be bound to the solid support, either by polymerizing the probes on the substrate, or by attaching a probe to the substrate. Association can be, covalent, electrostatic, noncovalent, hydrophobic, hydrophilic, noncovalent, coordination, adsorbed, absorbed, polar, etc. When fibers or hollow filaments are utilized for the array, the probes can fill the hollow orifice, be absorbed into the solid filament, be attached to the surface of the orifice, etc. Probes can be of any effective size, sequence identity, composition, etc., as already discussed.

[0187] Ordered arrays can further comprise polynucleotide probes or specific-binding partners which are specific for other genes, including genes specific for breast cancer or disorders associated with breast tissue.

[0188] Transgenic Animals

[0189] The present invention also relates to transgenic animals comprising differentially-regulated genes of the present invention. Such genes, as discussed in more detail below, include, but are not limited to, functionally-disrupted genes, mutated genes, ectopically or selectively-expressed genes, inducible or regulatable genes, etc. These transgenic animals can be produced according to any suitable technique or method, including homologous recombination, mutagenesis (e.g., ENU, Rathkolb et al., Exp. Physiol., 85(6):635-644, 2000), and the tetracycline-regulated gene expression system (e.g., U.S. Pat. No. 6,242,667). The term “gene” as used herein includes any part of a gene, i.e., regulatory sequences, promoters, enhancers, exons, introns, coding sequences, etc. The nucleic acid present in the construct or transgene can be naturally-occurring wild-type, polymorphic, or mutated. When a mouse or other mammal is used, the appropriate homolog can be used in place of a human gene of the present invention.

[0190] Along these lines, polynucleotides of the present invention can be used to create transgenic animals, e.g. a non-human animal, comprising at least one cell whose genome comprises a functional disruption of a differentially-regulated gene. By the phrases “functional disruption” or “functionally disrupted,” it is meant that the gene does not express a biologically-active product. It can be substantially deficient in at least one functional activity coded for by the gene. Expression of a polypeptide can be substantially absent, i.e., essentially undetectable amounts are made. However, polypeptide can also be made, but which is deficient in activity, e.g., where only an amino-terminal portion of the gene product is produced.

[0191] Functional disruptions can be made to the regions of the gene which are specific or unique to that gene, e.g., as disclosed herein. For instance, BCU0021 has a unique N-terminal region (e.g., amino acids 1-105 not shared by publicly available genes). A functional disruption can be made in this portion of the gene, or upstream to it. The transgenic animal can comprise one or more cells. When substantially all its cells contain the engineered gene, it can be referred to as a transgenic animal “whose genome comprises” the engineered gene. This indicates that the endogenous gene loci of the animal has been modified and substantially all cells contain such modification.

[0192] Functional disruption of the gene can be accomplished in any effective way, including, e.g., introduction of a stop codon into any part of the coding sequence such that the resulting polypeptide is biologically inactive (e.g., because it lacks a catalytic domain, a ligand binding domain, etc.), introduction of a mutation into a promoter or other regulatory sequence that is effective to turn it off, or reduce transcription of the gene, insertion of an exogenous sequence into the gene which inactivates it (e.g., which disrupts the production of a biologically-active polypeptide or which disrupts the promoter or other transcriptional machinery), deletion of sequences from the a differentially-regulated gene, etc. Examples of transgenic animals having functionally disrupted genes are well known, e.g., as described in U.S. Pat. Nos. 6,239,326, 6,225,525, 6,207,878, 6,194,633, 6,187,992, 6,180,849, 6,177,610, 6,100,445, 6,087,555, 6,080,910, 6,069,297, 6,060,642, 6,028,244, 6,013,858, 5,981,830, 5,866,760, 5,859,314, 5,850,004, 5,817,912, 5,789,654, 5,777,195, and 5,569,824. A transgenic animal which comprises the functional disruption can also be referred to as a “knock-out” animal, since the biological activity of its a differentially-regulated gene has been “knocked-out.” Knock-outs can be homozygous or heterozygous.

[0193] For creating functional disrupted genes, and other gene mutations, homologous recombination technology is of special interest since it allows specific regions of the genome to be targeted. Using homologous recombination methods, genes can be specifically-inactivated, specific mutations can be introduced, and exogenous sequences can be introduced at specific sites. These methods are well known in the art, e.g., as described in the patents above. See, also, Robertson, Biol. Reproduc., 44(2):238-245, 1991. Generally, the genetic engineering is performed in an embryonic stem (ES) cell, or other pluripotent cell line (e.g., adult stem cells, EG cells), and that genetically-modified cell (or nucleus) is used to create a whole organism. Nuclear transfer can be used in combination with homologous recombination technologies.

[0194] For example, a differentially-regulated gene locus can be disrupted in mouse ES cells using a positive-negative selection method (e.g., Mansour et al., Nature, 336:348-352, 1988). In this method, a targeting vector can be constructed which comprises a part of the gene to be targeted. A selectable marker, such as neomycin resistance genes, can be inserted into a a differentially-regulated gene exon present in the targeting vector, disrupting it. When the vector recombines with the ES cell genome, it disrupts the function of the gene. The presence in the cell of the vector can be determined by expression of neomycin resistance. See, e.g., U.S. Pat. No. 6,239,326. Cells having at least one functionally disrupted gene can be used to make chimeric and germline animals, e.g., animals having somatic and/or germ cells comprising the engineered gene. Homozygous knock-out animals can be obtained from breeding heterozygous knock-out animals. See, e.g., U.S. Pat. No. 6,225,525.

[0195] A transgenic animal, or animal cell, lacking one or more functional differentially-regulated genes can be useful in a variety of applications, including, as an animal model for cancer, for drug screening assays, as a source of tissues deficient in said gene activity, and any of the utilities mentioned in any issued U.S. Patent on transgenic animals, including, U.S. Pat. Nos. 6,239,326, 6,225,525, 6,207,878, 6,194,633, 6,187,992, 6,180,849, 6,177,610, 6,100,445, 6,087,555, 6,080,910, 6,069,297, 6,060,642, 6,028,244, 6,013,858, 5,981,830, 5,866,760, 5,859,314, 5,850,004, 5,817,912, 5,789,654, 5,777,195, and 5,569,824.

[0196] The present invention also relates to non-human, transgenic animal whose genome comprises recombinant a differentially-regulated gene nucleic acid operatively linked to an expression control sequence effective to express said coding sequence, e.g., in breast cancer such a transgenic animal can also be referred to as a “knock-in” animal since an exogenous gene has been introduced, stably, into its genome.

[0197] A recombinant a differentially-regulated gene nucleic acid refers to a gene which has been introduced into a target host cell and optionally modified, such as cells derived from animals, plants, bacteria, yeast, etc. A recombinant a differentially-regulated gene includes completely synthetic nucleic acid sequences, semi-synthetic nucleic acid sequences, sequences derived from natural sources, and chimeras thereof. “Operable linkage” has the meaning used through the specification, i.e., placed in a functional relationship with another nucleic acid. When a gene is operably linked to an expression control sequence, as explained above, it indicates that the gene (e.g., coding sequence) is joined to the expression control sequence (e.g., promoter) in such a way that facilitates transcription and translation of the coding sequence. As described above, the phrase “genome” indicates that the genome of the cell has been modified. In this case, the recombinant a differentially-regulated gene has been stably integrated into the genome of the animal. The a differentially-regulated gene nucleic acid in operable linkage with the expression control sequence can also be referred to as a construct or transgene.

[0198] Any expression control sequence can be used depending on the purpose. For instance, if selective expression is desired, then expression control sequences which limit its expression can be selected. These include, e.g., tissue or cell-specific promoters, introns, enhancers, etc. For various methods of cell and tissue-specific expression, see, e.g., U.S. Pat. Nos. 6,215,040, 6,210,736, and 6,153,427. These also include the endogenous promoter, i.e., the coding sequence can be operably linked to its own promoter. Inducible and regulatable promoters can also be utilized.

[0199] The present invention also relates to a transgenic animal which contains a functionally disrupted and a transgene stably integrated into the animals genome. Such an animal can be constructed using combinations any of the above- and below-mentioned methods. Such animals have any of the aforementioned uses, including permitting the knock-out of the normal gene and its replacement with a mutated gene. Such a transgene can be integrated at the endogenous gene locus so that the functional disruption and “knock-in” are carried out in the same step.

[0200] In addition to the methods mentioned above, transgenic animals can be prepared according to known methods, including, e.g., by pronuclear injection of recombinant genes into pronuclei of 1-cell embryos, incorporating an artificial yeast chromosome into embryonic stem cells, gene targeting methods, embryonic stem cell methodology, cloning methods, nuclear transfer methods. See, also, e.g., U.S. Pat. Nos. 4,736,866; 4,873,191; 4,873,316; 5,082,779; 5,304,489; 5,174,986; 5,175,384; 5,175,385; 5,221,778; Gordon et al., Proc. Natl. Acad. Sci., 77:7380-7384, 1980; Palmiter et al., Cell, 41:343-345, 1985; Palmiter et al., Ann. Rev. Genet., 20:465-499, 1986; Askew et al., Mol. Cell. Bio., 13:4115-4124, 1993; Games et al. Nature, 373:523-527, 1995; Valancius and Smithies, Mol. Cell. Bio., 11:1402-1408, 1991; Stacey et al., Mol. Cell. Bio., 14:1009-1016, 1994; Hasty et al., Nature, 350:243-246, 1995; Rubinstein et al., Nucl. Acid Res., 21:2613-2617,1993; Cibelli et al., Science, 280:1256-1258, 1998. For guidance on recombinase excision systems, see, e.g., U.S. Pat. Nos. 5,626,159, 5,527,695, and 5,434,066. See also, Orban, P. C., et al., “Tissue- and Site-Specific DNA Recombination in Transgenic Mice,” Proc. Natl. Acad. Sci. USA, 89:6861-6865 (1992); O'Gorman, S., et al., “Recombinase-Mediated Gene Activation and Site-Specific Integration in Mammalian Cells,” Science, 251:1351-1355 (1991); Sauer, B., et al., “Cre-stimulated recombination at loxP-Containing DNA sequences placed into the mammalian genome,” Polynucleotides Research, 17(1): 147-161 (1989); Gagneten, S. et al. (1997) Nucl. Acids Res. 25:3326-3331; Xiao and Weaver (1997) Nucl. Acids Res. 25:2985-2991; Agah, R. et al. (1997) J. Clin. Invest. 100:169-179; Barlow, C. et al. (1997) Nucl. Acids Res. 25:2543-2545; Araki, K. et al. (1997) Nucl. Acids Res. 25:868-872; Mortensen, R. N. et al. (1992) Mol. Cell. Biol. 12:2391-2395 (G418 escalation method); Lakhlani, P. P. et al. (1997) Proc. Natl. Acad. Sci. USA 94:9950-9955 (“hit and run”); Westphal and Leder (1997) Curr. Biol. 7:530-533 (transposon-generated “knock-out” and “knock-in”); Templeton, N. S. et al. (1997) Gene Ther. 4:700-709 (methods for efficient gene targeting, allowing for a high frequency of homologous recombination events, e.g., without selectable markers); PCT International Publication WO 93/22443 (functionally-disrupted).

[0201] A polynucleotide according to the present invention can be introduced into any non-human animal, including a non-human mammal, mouse (Hogan et al., Manipulating the Mouse Embryo: A Laboratory Manual, Cold Spring Harbor Laboratory, Cold Spring Harbor, N.Y., 1986), pig (Hammer et al., Nature, 315:343-345, 1985), sheep (Hammer et al., Nature, 315:343-345, 1985), cattle, rat, or primate. See also, e.g., Church, 1987, Trends in Biotech. 5:13-19; Clark et al., Trends in Biotech. 5:20-24, 1987); and DePamphilis et al., BioTechniques, 6:662-680, 1988. Transgenic animals can be produced by the methods described in U.S. Pat. No. 5,994,618, and utilized for any of the utilities described therein.

[0202] Database

[0203] The present invention also relates to electronic forms of polynucleotides, polypeptides, etc., of the present invention, including computer-readable medium (e.g., magnetic, optical, etc., stored in any suitable format, such as flat files or hierarchical files) which comprise such sequences, or fragments thereof, e-commerce-related means, etc. Along these lines, the present invention relates to methods of retrieving gene sequences from a computer-readable medium, comprising, one or more of the following steps in any effective order, e.g., selecting a cell or gene expression profile, e.g., a profile that specifies that said gene is differentially expressed in breast cancer, and retrieving said differentially expressed gene sequences, where the gene sequences consist of the genes represented by SEQ ID NOS 1, 3, 5, 7, 9, 11, 13, 15, 17, 19, 21, 23, 25, 27, 29, 31, 33, 35, 37, 39, 41, 43, 45, 47, 49, 51, 53, 55, 57, 59, 61, 63, 65, 67, 69, 71, 73, 75, 77, 79, 81, 83, 85, 87, 89, and 91.

[0204] A “gene expression profile” means the list of tissues, cells, etc., in which a defined gene is expressed (i.e, transcribed and/or translated). A “cell expression profile” means the genes which are expressed in the particular cell type. The profile can be a list of the tissues in which the gene is expressed, but can include additional information as well, including level of expression (e.g., a quantity as compared or normalized to a control gene), and information on temporal (e.g., at what point in the cell-cycle or developmental program) and spatial expression. By the phrase “selecting a gene or cell expression profile,” it is meant that a user decides what type of gene or cell expression pattern he is interested in retrieving, e.g., he may require that the gene is differentially expressed in a tissue, or he may require that the gene is not expressed in blood, but must be expressed in breast tissue. Any pattern of expression preferences may be selected. The selecting can be performed by any effective method. In general, “selecting” refers to the process in which a user forms a query that is used to search a database of gene expression profiles. The step of retrieving involves searching for results in a database that correspond to the query set forth in the selecting step. Any suitable algorithm can be utilized to perform the search query, including algorithms that look for matches, or that perform optimization between query and data. The database is information that has been stored in an appropriate storage medium, having a suitable computer-readable format. Once results are retrieved, they can be displayed in any suitable format, such as HTML.

[0205] For instance, the user may be interested in identifying genes that are differentially expressed in a breast cancer. He may not care whether small amounts of expression occur in other tissues, as long as such genes are not expressed in peripheral blood lymphocytes (see above for examples). A query is formed by the user to retrieve the set of genes from the database having the desired gene or cell expression profile. Once the query is inputted into the system, a search algorithm is used to interrogate the database, and retrieve results.

[0206] Advertising, Licensing, etc., Methods

[0207] The present invention also relates to methods of advertising, licensing, selling, purchasing, brokering, etc., genes, polynucleotides, specific-binding partners, antibodies, etc., of the present invention. Methods can comprises, e.g., displaying a a differentially-regulated gene gene, a differentially-regulated gene polypeptide, or antibody specific for a differentially-regulated gene in a printed or computer-readable medium (e.g., on the Web or Internet), accepting an offer to purchase said gene, polypeptide, or antibody.

[0208] Other

[0209] A polynucleotide, probe, polypeptide, antibody, specific-binding partner, etc., according to the present invention can be isolated. The term “isolated” means that the material is in a form in which it is not found in its original environment or in nature, e.g., more concentrated, more purified, separated from component, etc. An isolated polynucleotide includes, e.g., a polynucleotide having the sequenced separated from the chromosomal DNA found in a living animal, e.g., as the complete gene, a transcript, or a cDNA. This polynucleotide can be part of a vector or inserted into a chromosome (by specific gene-targeting or by random integration at a position other than its normal position) and still be isolated in that it is not in a form that is found in its natural environment. A polynucleotide, polypeptide, etc., of the present invention can also be substantially purified. By substantially purified, it is meant that polynucleotide or polypeptide is separated and is essentially free from other polynucleotides or polypeptides, i.e., the polynucleotide or polypeptide is the primary and active constituent. A polynucleotide can also be a recombinant molecule. By “recombinant,” it is meant that the polynucleotide is an arrangement or form which does not occur in nature. For instance, a recombinant molecule comprising a promoter sequence would not encompass the naturally-occurring gene, but would include the promoter operably linked to a coding sequence not associated with it in nature, e.g., a reporter gene, or a truncation of the normal coding sequence.

[0210] The term “marker” is used herein to indicate a means for detecting or labeling a target. A marker can be a polynucleotide (usually referred to as a “probe”), polypeptide (e.g., an antibody conjugated to a detectable label), PNA, or any effective material.

[0211] The topic headings set forth above are meant as guidance where certain information can be found in the application, but are not intended to be the only source in the application where information on such topic can be found.

[0212] Reference Materials

[0213] For other aspects of the polynucleotides, reference is made to standard textbooks of molecular biology. See, e.g., Hames et al., Polynucleotide Hybridization, IL Press, 1985; Davis et al., Basic Methods in Molecular Biology, Elsevir Sciences Publishing, Inc., New York, 1986; Sambrook et al., Molecular Cloning, CSH Press, 1989; Howe, Gene Cloning and Manipulation, Cambridge University Press, 1995; Ausubel et al., Current Protocols in Molecular Biology, John Wiley & Sons, Inc., 1994-1998.

[0214] The preceding preferred specific embodiments are, therefore, to be construed as merely illustrative, and not limiting the remainder of the disclosure in any way whatsoever. The entire disclosure of all applications, patents and publications, cited above and in the figures are hereby incorporated by reference in their entirety.

TABLE 1

| | Clone ID | Protein-L* | Location | Domains Names | |
|---|---|---|---|---|---|
| 1. | Bcd0468a | 98aa | Membrane | Signal peptide: 1-28aa | |
| | | | | Transmembrane domain: | |
| | | | | 20-42aa. (Partial CDS) | |
| 1. | Bcd0468b | 112aa | Membrane | Signal peptide: 1-29aa; | |
| | | | | (Partial CDS) | |
| | | | | Transmembrane: 20-42aa. | |
| 1. | Bcd0468c | 110aa | n/a | No domain found in the | |
| | | | | current protein databases. | |
| 2. | Bcu0021z | 404aa | Intra- | Nmra domain: 118-320aa. | |
| | | | cellular | | |
| 3. | Bcu0067z | 228aa | Membrane | Transmembrane: 13-35aa. | |
| 4. | Bcu0120 | 57aa | n/a | No domain found in the | |
| | | | | current protein databases. | |
| 5. | Bcu0148 | 97aa | n/a | No domain found in the | |
| | | | | current protein databases. | |
| 6. | Bcu0149 | 124aa | Membrane | 1. | Transmembrane |
| | | | | | 7-26aa; |
| | | | | 2. | BCL domain: |
| | | | | | 32-64aa; |
| | | | | 3. | TOP2c domain: |
| | | | | | 74-113aa. |
| 7. | Bcu0092 | 234aa | Membrane | 1. | Transmembrane |
| | | | | | domain: 55-74aa; |
| | | | | 2. | Transmembrane |
| | | | | | domain: 94-116aa; |
| | | | | 3. | Transmembrane |
| | | | | | domain: 123-142aa; |
| | | | | 4. | Transmembrane |
| | | | | | domain: 152-171aa. |
| 8. | Bcu0156x | 2677aa | Nuclear | 1. | DEXDc3 domain: |
| | | | | | 1930-2244aa |
| | | | | 2. | Urdu/REP helicase |
| | | | | | domain: 1935-2210aa; |
| | | | | 3. | ATP/GTP-binding site |
| | | | | | motif A (P-loop): |
| | | | | | 1963-1970aa; |
| | | | | 4. | Nuclear localization |
| | | | | | signal: 2070-2087aa. |
| 9. | Bcu0258x | 1078aa | Mem- | 1. | Myosin_head (large |
| | | | brane- | | ATPase) domain: |
| | | | associated | | 17-688aa; |
| | | | 1 | 2. | IQ motif: 703-725aa; |
| | | | | 3. | IQ motif: 726-748aa; |
| | | | | 4. | IQ motif: 749-771aa; |
| | | | | 5. | IQ motif: 778-800aa. |
| 10. | Bcu0343 | 811aa | Nuclear | 1. | KRAB domain: |
| | | | | | 12-72aa; |
| | | | | 2. | Internal repeat domain: |
| | | | | | 140-279aa; |
| | | | | 3. | ZnF_C2H2 domain: |
| | | | | | 328-350aa; |
| | | | | 4. | ZnF_C2H2 domain: |
| | | | | | 356-378aa; |
| | | | | 5. | ZnF_C2H2 domain: |
| | | | | | 384-406aa; |
| | | | | 6. | ZnF_C2H2 domain: |
| | | | | | 412-434aa; |
| | | | | 7. | ZnF_C2H2 domain: |
| | | | | | 440-462aa; |
| | | | | 8. | ZnF_C2H2 domain: |
| | | | | | 468-490aa; |
| | | | | 9. | ZnF_C2H2 domain: |
| | | | | | 496-518aa; |
| | | | | 10. | ZnF_C2H2 domain: |
| | | | | | 524-54aa; |
| | | | | 11. | ZnF_C2H2 domain: |
| | | | | | 552-574aa; |
| | | | | 12. | ZnF_C2H2 domain: |
| | | | | | 580-602aa; |
| | | | | 13. | ZnF_C2H2 domain: |
| | | | | | 608-630aa; |
| | | | | 14. | ZnF_C2H2 domain: |
| | | | | | 636-658aa; |
| | | | | 15. | ZnF_C2H2 domain: |
| | | | | | 664-686aa; |
| | | | | 16. | ZnF_C2H2 domain: |
| | | | | | 692-714aa; |
| | | | | 17. | ZnF_C2H2 domain: |
| | | | | | 720-742aa |
| | | | | 18. | ZnF_C2H2 domain: |
| | | | | | 748-770aa; |
| | | | | 19. | LIM domain: |
| | | | | | 637-697aa. |
| | | | | 20. | ZnF_GATA domain: |
| | | | | | 688-746aa. |
| | | | | 21. | ZnF_BED domain: |
| | | | | | 730-773aa. |
| 11a. | Bcu371Az | 199aa | Nuclear | No domain found in the | |
| | | | | current protein databases. | |
| 11b. | Bcu0371Bz | 237aa | Nuclear | Basic region leucine zipper | |
| | | | | (BRLZ) domain: | |
| | | | | 153-217aa | |
| 12. | Bcu399 | 487aa | Membrane | 1. | Transmembrane |
| | | | | | domain: 49-71aa; |
| | | | | 2. | Transmembrane |
| | | | | | domain: 86-103aa. |
| 13. | Bcu0408z | 504aa | Nuclear | 1. | Coiled coil domain: |
| | | | | | 51-81aa. |
| | | | | 2. | Protein kinase |
| | | | | | (unclassified |
| | | | | | specificity) domain: |
| | | | | | 228-331aa. |
| 14. | Bcu0475z | 191aa | Cytoplasm | 1. | Thioredoxin-like |
| | | | | | domain: 95-176aa. |
| 15. | Bcu0504 | 367aa | Cytoplasm | 1. | WD40 domains: |
| | | | | | 50-89aa; |
| | | | | 2. | WD40 domains: |
| | | | | | 92-131aa; |
| | | | | 3. | WD40 domains: |
| | | | | | 135-174aa; |
| | | | | 4. | WD40 domains: |
| | | | | | 177-216aa; |
| | | | | 5. | WD40 domains: |
| | | | | | 267-310aa; |
| | | | | 6. | WD40 domains: |
| | | | | | 313-352aa. |
| 16. | Bcu0571 | 128aa | Cytoplasm | No domain found in the | |
| | | | | current protein databases. | |
| 17. | Bcu0720x | 1337aa | Nuclear | No domain found in the | |
| | | | | current protein databases. | |
| 18. | Bcu0721z | 1179aa | Membrane | 1. | Cysteine-rich repeat in |
| | | | | | FGFR: 153-212aa; |
| | | | | 2. | Cysteine-rich repeat in |
| | | | | | FGFR: 291-345aa; |
| | | | | 3. | Cysteine-rich repeat in |
| | | | | | FGFR: 349-413aa |
| | | | | 4. | Cysteine-rich repeat in |
| | | | | | FGFR: 417-473aa; |
| | | | | 5. | Cysteine-rich repeat in |
| | | | | | FGFR: 480-537aa; |
| | | | | 6. | Cysteine-rich repeat in |
| | | | | | FGFR: 540-604aa; |
| | | | | 7. | Cysteine-rich repeat in |
| | | | | | FGFR: 612-666aa; |
| | | | | 8. | Cysteine-rich repeat in |
| | | | | | FGFR: 670-728aa; |
| | | | | 9. | Cysteine-rich repeat in |
| | | | | | FGFR: 732-788aa; |
| | | | | 10. | Cysteine-rich repeat in |
| | | | | | FGFR: 800-854aa; |
| | | | | 11. | Cysteine-rich repeat in |
| | | | | | FGFR: 858-911aa; |
| | | | | 12. | Cysteine-rich repeat in |
| | | | | | FGFR: 915-972aa; |
| | | | | 13. | Cysteine-rich repeat in |
| | | | | | FGFR: 982-1042aa; |
| | | | | 14. | Cysteine-rich repeat in |
| | | | | | FGFR: 1046-1011aa; |
| | | | | 15. | Transmembrane |
| | | | | | domain: 1146-1168aa. |
| 19. | Bcu0730Ax | 543aa | Cytoplasm | No domain found in the | |
| | | | | current protein databases. | |
| 19. | Bcu0730Bx | 516aa | Cytoplasm | No domain found in the | |
| | | | | current protein databases. | |
| 19. | Bcu0730Cx | 538aa | Cytoplasm | No domain found in the | |
| | | | | current protein databases. | |
| 19. | Bcu0730Dx | 585aa | Cytoplasm | No domain found in the | |
| | | | | current protein databases. | |
| 20. | Bcu770 | 463aa | Extra- | 1. | FN1 domain-1: |
| | | | cellular | | 88-123aa; |
| | | | | 2. | FN1 domain-2: |
| | | | | | 133-171aa; |
| | | | | 3. | FN1 domain-3: |
| | | | | | 177-215aa; |
| | | | | 4. | FN1 domain-4: |
| | | | | | 222-261aa; |
| | | | | 5. | FN1 domain-5: |
| | | | | | 267-306aa; |
| | | | | 6. | FN1 domain-6: |
| | | | | | 344-378aa; |
| | | | | 7. | FN2 domain-1: |
| | | | | | 393-403aa; |
| | | | | 8. | FN2 domain-2: |
| | | | | | 404-417aa; |
| | | | | 9. | FN2 domain-3: |
| | | | | | 421-437aa; |
| | | | | 10. | Glycosyl hydrolase |
| | | | | | family domain-1: |
| | | | | | 118-145aa; |
| | | | | 11. | Glycosyl hydrolase |
| | | | | | family domain-2: |
| | | | | | 365-393aa; |
| | | | | 12. | EGF-like domain: |
| | | | | | 112-123aa. |
| 21. | Bcu0840 | 723aa | Nuclear | TROX domain: 102-290aa. | |
| 22. | Bcu0862 | 112aa | Nuclear | No domain found in the | |
| | | | | current protein databases. | |
| 23. | Bcu0916z | 118aa | Nuclear | No domain found in the | |
| | | | | current protein databases. | |
| 24. | Bcu0918-2 | 813aa | Cytoplasm | No domain found in the | |
| | | | | current protein databases. | |
| 25. | Bcu0947xz | 3051aa | Nuclear | 1. | Proline-rich region: |
| | | | | | 5-36aa; |
| | | | | 2. | Coiled coil: |
| | | | | | 288-310aa; |
| | | | | 3. | Coiled coil: |
| | | | | | 350-374aa; |
| | | | | 4. | Coiled coil: |
| | | | | | 497-527aa; |
| | | | | 5. | Coiled coil: |
| | | | | | 554-599aa; |
| | | | | 6. | Coiled coil: |
| | | | | | 818-841aa; |
| | | | | 7. | CT domain: |
| | | | | | 1309-2187aa; |
| | | | | 8. | AT_hook domain: |
| | | | | | 2872-2884aa; |
| | | | | 9. | TT_ORF2 domain: |
| | | | | | 77-129aa. |
| 26. | Bcu1034 | 264aa | Extra- | 1. | Signal peptide: 1-21aa |
| | | | cellular | 2. | Thrombospondin type |
| | | | | | 1 repeats (TSP1) |
| | | | | | domain: 77-133aa. |
| 27. | Bcu1041 | 614aa | Nuclear | 1. | bZIP domain: |
| | | | | | 228-275aa. |
| 28. | Bcu0610Az | 582aa | Nuclear | 1. | RNA recognition |
| | | | | | motif: 126-188aa; |
| | | | | 2. | Lupus La protein |
| | | | | | domain: 41-59aa; |
| | | | | 3. | Lupus La protein |
| | | | | | domain: 67-83aa; |
| | | | | 4. | Lupus La protein |
| | | | | | domain: 98-112aa; |
| | | | | 5. | Lupus La protein |
| | | | | | domain: 165aa-184aa. |
| 28. | Bcu0610Bz | 582aa | Same as Bcu0610Az. | | |
| 29. | Bcu0586 | 2376aa | Cytoplasm | Not found in current | |
| | | | | protein databases. | |
| 30. | Bcu0715Az | 791aa | Cytoplasm | 1. | Calpain inhibitor |
| | | | | | domain: 177-307aa; |
| | | | | 2. | Calpain inhibitor |
| | | | | | domain: 312-442aa; |
| | | | | 3. | Calpain inhibitor |
| | | | | | domain: 447-584aa; |
| | | | | 4. | Calpain inhibitor |
| | | | | | domain: 590-720aa. |
| 30. | Bcu0715Bz | 769aa | Cytoplasm | 1. | Calpain inhibitor |
| | | | | | domain: 155-285aa; |
| | | | | 2. | Calpain inhibitor |
| | | | | | domain: 290-420aa; |
| | | | | 3. | Calpain inhibitor |
| | | | | | domain: 425-562aa; |
| | | | | 4. | Calpain inhibitor |
| | | | | | domain: 568-698aa. |
| 30. | Bcu0715Cz | 750aa | Cytoplasm | 1. | Calpain inhibitor |
| | | | | | domain: 136-266aa; |
| | | | | 2. | Calpain inhibitor |
| | | | | | domain: 271-401aa; |
| | | | | 3. | Calpain inhibitor |
| | | | | | domain: 406-543aa; |
| | | | | 4. | Calpain inhibitor |
| | | | | | domain: 549-679aa. |
| 31. | Bcu0205Az | 2551aa | Membrane | 1. | Transmembrane |
| | | | | | domain: 233-245aa; |
| | | | | 2. | Epidermal growth |
| | | | | | factor-like domain: |
| | | | | | 423-451aa; |
| | | | | 3. | Epidermal growth |
| | | | | | factor-like domain: |
| | | | | | 454-482aa; |
| | | | | 4. | Epidermal growth |
| | | | | | factor-like domain: |
| | | | | | 487-516aa; |
| | | | | 5. | Epidermal growth |
| | | | | | factor-like domain: |
| | | | | | 553-583aa; |
| | | | | 6. | Calcium-binding |
| | | | | | EGF-like domain: |
| | | | | | 517-548aa; |
| | | | | 7. | Calcium-binding |
| | | | | | EGF-like domain: |
| | | | | | 583-618aa. |
| 31. | Bcu0205Bz | 2633aa | Membrane | 1. | Transmembrane |
| | | | | | domain: 305-327aa; |
| | | | | 2. | Epidermal growth |
| | | | | | factor-like domain: |
| | | | | | 505-533aa; |
| | | | | 3. | Epidermal growth |
| | | | | | factor-like domain: |
| | | | | | 536-564aa; |
| | | | | 4. | Epidermal growth |
| | | | | | factor-like domain: |
| | | | | | 569-598aa; |
| | | | | 5. | Epidermal growth |
| | | | | | factor-like domain: |
| | | | | | 635-665aa; |
| | | | | 6. | Calcium-binding |
| | | | | | EGF-like domain: |
| | | | | | 601-630aa; |
| | | | | 7. | Calcium-binding |
| | | | | | EGF-like domain: |
| | | | | | 668-700aa. |
| 32. | Bcu0988Az | 843aa | Nuclear | 1. | RRM domain: |
| | | | | | 88-160aa (RNA |
| | | | | | recognition motif); |
| | | | | 2. | Coiled coil: |
| | | | | | 271-352aa; |
| | | | | 3. | Coiled coil: |
| | | | | | 355-554aa; |
| | | | | 3. | PWI domain (In |
| | | | | | splicing factors): |
| | | | | | 763-836aa. |
| 32. | Bcu0988Bz | 779aa | Nuclear | 1. | RRM domain: |
| | | | | | 88-160aa (RNA |
| | | | | | recognition motif) |
| | | | | 2. | Coiled coil: |
| | | | | | 271-490aa; |
| | | | | 3. | PWI domain (In |
| | | | | | splicing factors): |
| | | | | | 699-772aa. |
| 33. | Bcu0518z | 1906aa | Nuclear | 1. | S1 (ribosomal protein |
| | | | | | S1-like RNA-binding) |
| | | | | | domain: 116-206aa; |
| | | | | 2. | S1 domain: |
| | | | | | 220-293aa; |
| | | | | 3. | S1 domain: |
| | | | | | 314-381aa; |
| | | | | 4. | S1 domain: |
| | | | | | 398-471aa; |
| | | | | 5. | S1 domain: |
| | | | | | 486-557aa; |
| | | | | 6. | S1 domain: |
| | | | | | 575-646aa; |
| | | | | 7. | S1 domain: |
| | | | | | 669-742aa; |
| | | | | 8. | S1 domain: |
| | | | | | 762-833aa; |
| | | | | 9. | S1 domain: |
| | | | | | 879-946aa; |
| | | | | 10. | S1 domain: |
| | | | | | 1069-1144aa; |
| | | | | 11. | S1 domain: |
| | | | | | 1182-1257aa; |
| | | | | 12. | S1 domain: |
| | | | | | 1263-1333aa; |
| | | | | 13. | S1 domain: |
| | | | | | 1357-1431aa; |
| | | | | 14. | Coiled coil domain: |
| | | | | | 1441-1480aa; |
| | | | | 15. | Coiled coil domain: |
| | | | | | 1601-1632aa; |
| | | | | 16. | HAT domain: |
| | | | | | 1635-1666aa; |
| | | | | 17. | HAT domain: |
| | | | | | 1668-1705aa; |
| | | | | 18. | HAT domain: |
| | | | | | 1707-1738aa; |
| | | | | 19. | HAT domain: |
| | | | | | 1740-1772aa; |
| | | | | 20. | HAT domain: |
| | | | | | 1774-1808aa; |
| | | | | 20. | HAT domain: |
| | | | | | 1774-1808aa; |
| | | | | 21. | HAT domain: |
| | | | | | 1810-1842aa; |
| | | | | 22. | HAT domain: |
| | | | | | 1844-1879aa; |
| | | | | 23. | TRP repeat domain: |
| | | | | | 1726-1829aa. |
| 34. | Bcu0147Az | 958aa | Nuclear | 1. | R3H domain: |
| | | | | | 152-229aa; |
| | | | | | (Single-strand nucleic |
| | | | | | acids-binding) |
| | | | | 2. | Proline-rich region: |
| | | | | | 606-704aa. |
| 34. | Bcu0147Bz | 976aa | Nuclear | 1. | R3H domain: |
| | | | | | 152-229aa; |
| | | | | | (Single-strand nucleic |
| | | | | | acids-binding) |
| | | | | 2. | Proline-rich region: |
| | | | | | 624-722aa. |

1 Associated with the cytoplasmic side of the cell membrane
L* stands for protein length in amino acids

[0215] TABLE 2

| | Clone ID | Locus | Associated diseases | |
|---|---|---|---|---|
| 1. | Bcd0468 | 20q11.1-q11.22 | 1. | Congenital dyserythropoietic |
| | | | | anaemia type II (CDAN2) |
| | | | | at 20q11.2. |
| 2. | Bcu0021 | 16p13.3 | 1. | Polycystic Kidney Disease |
| | | | | (PKDTS) at 16.p13.3. |
| | | | 2. | Microphthalmia-cataract at |
| | | | | 16p13.3. |
| 3. | Bcu0067 | 5q14.1 | 1. | Hyaloideoretinal degeneration |
| | | | | of Wagner at 5q13-q14. |
| 4. | Bcu0120 | 3q25.1 | 1. | Dandy-Walker variant |
| | | | | malformation and |
| | | | | hydrocephalus at 3q25.1. |
| 5. | Bcu0148 | 6q21.3 | 1. | Specific dystexia 2 at 6p21.3; |
| | | | 2. | Ankylosing spondylitis at |
| | | | | 6p21.3; |
| | | | 3. | Renal glucosuria at 6p21.13; |
| | | | 4. | IDDM1 at 6p21.23; |
| | | | 5. | Atrial septal defect at 6p21.3; |
| | | | 6. | Hypotrichosis simplex of |
| | | | | scalp at 6p21.3; |
| | | | 7. | Diffuse panbronchiolitis at |
| | | | | 6p21.3; |
| | | | 8. | Immunoglobulin A deficiency |
| | | | | susceptibility 1 at 6p21.23. |
| 6. | Bcu0149 | 17q22-q23 | 1. | Meckel syndrome, Type 1; |
| | | | | MKS1 at 17q22-q23; |
| | | | 1. | Malignant Hyperthermia |
| | | | | susceptibility 2; MHS2 at |
| | | | | 17q11.2-q24; |
| 7. | Bcu0092 | 7p14 | 1. | Neuronal type D Charcot- |
| | | | | Maine-Tooth Disease at 7p14. |
| 8. | Bcu0156x | 9q34.3 | 1. | Joubert syndrome 1 at 9q14.3; |
| | | | 2. | Recessive non-Friedreich |
| | | | | spinocerebellar ataxia at 9q34; |
| | | | 3. | Primary autosomal recessive |
| | | | | microcephaly 3 at 9q34; |
| | | | 4. | Juvenile amyotrophic lateral |
| | | | | sclerosis 4 at 9q34; |
| | | | 5. | Lethal congenital contractures |
| | | | | syndrome at 9q34. |
| 9. | Bcu0258x | 2q32.3 | 1. | Familial arrhythmogenic right |
| | | | | ventricular dysplasia 4 at |
| | | | | 2q32.1-q32.3; |
| | | | 2. | Wrinkly skin syndrome at |
| | | | | 3q32. |
| 10. | Bcu0343 | 10p11.1-p11.22 | 1. | Thrombocytopenia at |
| | | | | 10p11.2-p12. |
| 11. | Bcu0371 | 19q13.2 | 1. | Cystic fibrosis modifier 1 at |
| | | | | 9q13.2-q13.4; |
| | | | 2. | OPA3 19q13.2-q13.3; |
| | | | 3. | Liposarcoma oncogene at |
| | | | | 19q13.2-q13.3. |
| 12. | Bcu0399 | 5q14.3 | 1. | Usher syndrome type II at |
| | | | | 5q14-q21; |
| | | | 2. | Hyaloideoretinal degeneration |
| | | | | of wagner at 5q13-q14. |
| 13. | Bcu0408 | 17q11.2 | 1. | No disease association. |
| 14. | Bcu0475z | 14q32.2 | 1. | Usher syndrome type1A at |
| | | | | 14q32; |
| | | | 2. | Autosomal recessive |
| | | | | microphthalmos at 14q32; |
| | | | 3. | Hemifacial microsomia at |
| | | | | 14q32; |
| | | | 4. | Ectopic expression of brain |
| | | | | type of creatine kinase |
| | | | | at 14q32. |
| 15. | Bcu0504 | 9q32-q32.2 | 1. | Muscular dystrophy, |
| | | | | LIMB-Girdle type 2H at |
| | | | | 9q31-q34.1. |
| 16. | Bcu0571 | 8q24.12 | 1. | Childhood absence epilepsy at |
| | | | | 8q24; |
| | | | 2. | Benign adult familial |
| | | | | myoclonic epilepsy at 8q24; |
| | | | 3. | Generalized idiopathic |
| | | | | epilepsy at 8q24; |
| | | | 4. | Macular dystrophy-1, atypical |
| | | | | vitelliform at 8q24; |
| | | | 5. | Epidermolysis bullosa simplex |
| | | | | at 8q24; |
| | | | 6. | Langer-giedion syndrome at |
| | | | | 8q24.11-q24.13; |
| | | | 7. | Spinocerebellar ataxia 16 at |
| | | | | 8q22.1-q24.1. |
| 17. | Bcu0729x | 4p14 | 1. | Del(4)(14) cause breast and |
| | | | | ovary cancers; |
| | | | 2. | Trisomy causes ovary and |
| | | | | breast cancers; |
| | | | 3. | Monosomy causes breast, |
| | | | | ovary and prostate tumors. |
| 18. | Bcu0721z | 16q22 3 | 1. | Aneurysmal bone cysts at |
| | | | | 16q22; |
| | | | 2. | North American Indian |
| | | | | childhood cirrhosis at 16q22; |
| | | | 3. | Acute myelogenous leukemia |
| | | | | at 16q22. |
| 19. | Bcu0730x | 15q21 | 1. | Congenital dyserythropoietic |
| | | | | anemia type III (CDAN3) |
| | | | | at 15q21; |
| | | | 2. | Specific dystexia 1 at 15q21; |
| | | | 3. | Hereditary non-polyposis |
| | | | | colorectal cancer type 7 at |
| | | | | 15q21.1. |
| 20. | Bcu0770 | 2q35 | 1. | Brachydactyly, Type A1; |
| | | | | BDA1 at 2q35-q36. |
| | | | 2. | Syndactyly, Type I at |
| | | | | 2q34-q36. |
| 21. | Bcu0840 | 12q24.1 | 1. | Adult spinal muscular atrophy |
| | | | | at 12q24; |
| | | | 2. | New England type neurogenic |
| | | | | scapuloperoneal amyotrophy |
| | | | | at 12q24.1-q24.31. |
| 22. | Bcu0862 | 17q12 | 1. | Amplification of the c-erbB-2 |
| | | | | locus (17q12-q21.32) causes |
| | | | | gastric cancer. |
| 23. | Bcu0916z | 10q22.1 | 1. | No genomic DNA available, |
| | | | | therefore no data yet. |
| 24. | Bcu918-2 | 4q21.3 | 1. | Mucolipidosis II (1-cell |
| | | | | disease) at 4q21-q23; |
| | | | 2. | Hyper-IgE Syndrome at 4q21; |
| | | | 3. | Mental health wellness 2 at |
| | | | | 4p (Disease locus at D4S397). |
| 25. | Bcu0947xz | 4p15.33 | 1. | Autosomal dominant lewy |
| | | | | body Parkinson disease 4 |
| | | | | (PARK4) at 4p15; |
| | | | 2. | Huntington disease-like 3 |
| | | | | (HDL3) at 4p15.13; |
| | | | 3. | Susceptibility to systemic |
| | | | | Lupus erythematosus 3 at |
| | | | | 4p15.2-p16. |
| 26. | Bcu1034 | 8q13.2 | 1. | Familial febrile convulsions |
| | | (Pr0453) | | 1; FEB1 at 8q13-q21. |
| 27. | Bcu1041 | 17q21.1 | 1. | Patella aplasia-hypoplasia |
| | | | | at 17q21-q22; |
| | | | 2. | Familial progressive |
| | | | | subcortical Gliosis at |
| | | | | 17q21-q22; |
| | | | 3. | Pallidopontonigral |
| | | | | degeneration at 17q21. |
| 28. | Bcu0610Az | | 1. | No genomic DNA available, |
| | | | | therefore no data yet. |
| 28. | Bcu0610Bz | | | |
| 29. | Bcu0586 | 16q13 | 1. | Brooke-Spiegler syndrome |
| | | | | at 16q12-q13. |
| 30. | Bcu0715Az | 5q14.3 | 1. | Hyaloideoretinal degeneration |
| | | | | of Wagner at 5q13-q14; |
| | | | 2. | Trisomy and monosomy at |
| | | | | 5q14 causes cancers in breast, |
| | | | | ovary and prostate. |
| 30. | Bcu0715Bz | 5q14.3 | | same as Bcu0715Az. |
| 30. | Bcu0715Cz | 5q14.3 | | same as Bcu0715Az. |
| 31. | Bcu0205Az | 5q33.3 | 1. | Atopic dermatitis 6 at |
| | | | | 5q31-q33; |
| | | | 2. | Capillary infantile |
| | | | | hemangioma at 5q31-q3; |
| | | | 3. | Asthma at 5q31-q33; |
| | | | 4. | Susceptibility/Resistance to |
| | | | | Schistosoma mansoni |
| | | | | infection at 5q31-q33; |
| | | | 5. | Familial eosinophilia at |
| | | | | 5q31-q33. |
| 31. | Bcu0205Bz | 5q33.3 | | same as Bcu0205Az |
| 32. | Bcu0988 | 14q24.3 | 1. | Leber congenital amaurosis |
| | | | | type III at 14q24; |
| | | | 2. | Familial arrhythmogenic right |
| | | | | ventricular dysplasia-1 |
| | | | | (ARVD1) at 14q23-q24. |
| 33. | Bcu0518z | 10q24.32 | 1. | Type II corneal dystrophy of |
| | | | | bowman layer at 10q24; |
| | | | 2. | Infantile-onset spinocerebellar |
| | | | | ataxia at 10q24. |
| 34. | Bcu0147Az | 12q13.2 | 1. | Autosomal dominant spastic |
| | | | | paraplegia-10 at 12q13; |
| | | | 2. | Bothnian type palmoplantar |
| | | | | keratoderma at 12q11-qt3. |
| 34. | Bcu0147z | 12q13.2 | | same as Bcu0147z. |

[0216] TABLE 3

| Gene Name | SEQ ID NO | Expression | |
|---|---|---|---|
| BCD0468 | 1-2 (A); | DOWN | |
| | 3-4 (B); | | |
| | 5-6 (C) | | |
| BCU0021 | 7-8 | UP IL | |
| BCU0067 | 9-10 | UP IL | |
| BCU0120 | 11-14 | UP IL | normal expression |
| | | | restricted to breast |
| BCU0148 | 15-16 | UP IL | |
| BCU0149 | 17-18 | UP DIH | |
| BCU0092 | 19-20 | UP DL | |
| BCU0156 | 21-22 | UP DIL | normal expressed |
| | | | restricted to thymus |
| BCU0258 | 23-24 | UP DIL | |
| BCU0343 | 25-26 | UP DIM | |
| BCU0371 | 27-28 (A); | | |
| | 29-30 (B) | | |
| BCU0408 | 31-32 | UP DIL | |
| BCU0475 | 33-34 | UP DH | |
| BCU0504 | 35-36 | UP DIL | |
| BCU0571 | 37-38 | UP DIL | |
| BCU0720 | 39-40 | UP DIM | |
| BCU0721 | 41-42 | UP IL | |
| BCU0730 | 43-44 (A); | UP DIL | |
| | 45-46 (B); | | |
| | 47-48 (C); | | |
| | 49-50 (D) | | |
| BCU0770 | 51-52 | IH | |
| BCU0840 | 53-54 | UP DH | normal expression |
| | | | restricted to adrenal |
| | | | and prostate glands |
| BCU0862 | 55-56 | UP DH | |
| BCU0916 | 57-58 | UP DL | |
| BCU0918 | 59-60 | UP DM | |
| BCU0947 | 61-62 | UP DIL | |
| BCU1034 | 63-64 | UP DL | |
| BCU1041 | 65-66 | UP DL | |
| BCU0610 | 67-68 (A); | UP DIH | |
| | 69-70 (B) | | |
| BCU0586 | 71-72 | UP DIM | |
| BCU0715 | 73-74 (A); | UP DIM | |
| | 75-76 (B); | | |
| | 77-78 (C) | | |
| BCU0205 | 79-80 (A); | UP DL | |
| | 81-82 (B) | | |
| BCU0988 | 83-84 (A); | UP DIM | |
| | 85-86 (B) | | |
| BCU0518 | 87-88 | UP DIL | |
| BCU0147 | 89-90 (A); | UP IL | |
| | 91-92 (B) | | |

I = invasive ductal carcinoma (IDC);
D = ductal carcinoma in situ (DCIS);
L = low expression;
M = medium expression;
H = high expression

1. An isolated polynucleotide which codes without interruption for a human differentially-regulated breast cancer gene having an amino acid sequence selected from SEQ ID NOS 2, 4, 6, 8, 10, 12, 16, 18, 20, 22, 24, 26, 28, 30, 32, 34, 36, 38, 40, 42, 44, 46, 48, 50, 52, 54, 56, 58, 60, 62, 64, 66, 68, 70, 72, 74, 76, 78, 80, 82, 84, 86, 88, 90, and 92, or a complement thereto.

2. An isolated polynucleotide having a polynucleotide sequence selected from SEQ ID NOS 1, 3, 5, 7, 9, 11, 13, 15, 17, 19, 21, 23, 25, 27, 29, 31, 33, 35, 37, 39, 41, 43, 45, 47, 49, 51, 53, 55, 57, 59, 61, 63, 65, 67, 69, 71, 73, 75, 77, 79, 81, 83, 85, 87, 89, and 91, and which is differentially-regulated in breast cancer.

3. An isolated polynucleotide comprising,
a coding sequence for a human differentially-regulated breast cancer gene having 99% or more nucleotide sequence identity along its entire length to a polynucleotide sequence selected from: SEQ ID NOS 1, 3, 5, 7, 9, 11, 13, 15, 17, 19, 21, 23, 25, 27, 29, 31, 33, 35, 37, 39, 41, 43, 45, 47, 49, 51, 53, 55, 57, 59, 61, 63, 65, 67, 69, 71, 73, 75, 77, 79, 81, 83, 85, 87, 89, and 91, and which codes without interruption for said coding sequence, or a complement thereto.

4. An isolated polynucleotide which is specific for a human differentially-regulated breast cancer gene of claim 1 and having a nucleotide sequence selected from: SEQ ID NOS 1, 3, 5, 7, 9, 11, 13, 15, 17, 19, 21, 23, 25, 27, 29, 31, 33, 35, 37, 39, 41, 43, 45, 47, 49, 51, 53, 55, 57, 59, 61, 63, 65, 67, 69, 71, 73, 75, 77, 79, 81, 83, 85, 87, 89, and 91.

5. An isolated polynucleotide of claim 4, wherein said fragment is effective in a polymerase chain reaction.

6. An isolated human differentially-regulated breast cancer gene having an amino acid sequence selected from SEQ ID NOS 2, 4, 6, 8, 10, 12, 16, 18, 20, 22, 24, 26, 28, 30, 32, 34, 36, 38, 40, 42, 44, 46, 48, 50, 52, 54, 56, 58, 60, 62, 64, 66, 68, 70, 72, 74, 76, 78, 80, 82, 84, 86, 88, 90, and 92.

7. An isolated polypeptide which is a human differentially-regulated breast cancer gene having 99% or more amino acid sequence identity along its entire length to an amino acid sequence selected from SEQ ID NOS 2, 4, 6, 8, 10, 12, 16, 18, 20, 22, 24, 26, 28, 30, 32, 34, 36, 38, 40, 42, 44, 46, 48, 50, 52, 54, 56, 58, 60, 62, 64, 66, 68, 70, 72, 74, 76, 78, 80, 82, 84, 86, 88, 90, and 92.

8. A method of detecting a nucleic acid coding for a human differentially-regulated breast cancer gene, comprising,
contacting a sample comprising nucleic acid with a polynucleotide probe specific for a human differentially-regulated breast cancer gene of claim 1 under conditions effective for said probe to hybridize specifically with said gene, and
detecting hybridization between said probe and said nucleic acid.

9. A method of claim 8, wherein said detecting is performed by:
Northern blot analysis, polymerase chain reaction (PCR), reverse transcriptase PCR, RACE PCR, or in situ hybridization.

10. A method of treating a breast cancer showing elevated expression of a human differentially-regulated breast cancer gene, comprising:
administering to a subject in need thereof a therapeutic agent which is effective for regulating expression of a human differentially-regulated breast cancer gene polynucleotide, or polypeptide encoded thereby, of claim 1.

11. A method for identifying an agent that modulates the expression of a human differentially-regulated breast cancer gene in cells expressing said gene, or the biological activity of a polypeptide encoded thereby, comprising,
contacting a cell with a test agent under conditions effective for said test agent to modulate the expression of a human gene of claim 2, or the biological activity of a polypeptide encoded thereby, in said cell, and
determining whether said test agent modulates said gene or polypeptide.

12. A method of claim 11, wherein said agent is an antisense polynucleotide to a target polynucleotide sequence selected from SEQ ID NOS 1, 3, 5, 7, 9, 11, 13, 15, 17, 19, 21, 23, 25, 27, 29, 31, 33, 35, 37, 39, 41, 43, 45, 47, 49, 51, 53, 55, 57, 59, 61, 63, 65, 67, 69, 71, 73, 75, 77, 79, 81, 83, 85, 87, 89, and 91, and which is effective to inhibit translation of said gene.

13. A method of detecting polymorphisms in a human differentially-regulated breast cancer gene, comprising,
comparing the structure of: genomic DNA comprising all or part of a human differentially-regulated breast cancer gene, mRNA comprising all or part of a human differentially-regulated breast cancer gene, cDNA comprising all or part of a human differentially-regulated breast cancer gene, or a polypeptide comprising all or part of a human differentially-regulated breast cancer gene, with the complete structure of a human differentially-regulated breast cancer gene of claim 2.

14. A method of claim 13, wherein said polymorphism is a nucleotide deletion, substitution, inversion, or transposition.

15. A mammalian cell whose genome comprises a functional disruption of a human differentially-regulated breast cancer gene of claim 1 within a nucleotide sequence which is specific for said gene.

16. A non-human, transgenic mammal comprising a cell of claim 15, said mammal being susceptible to breast cancer.

17. An antibody which is specific-for: a polypeptide sequence which is specific for a human differentially-regulated breast cancer gene of claim 1.

18. A method of selecting a human differentially-regulated breast cancer gene polynucleotide or amino acid sequence from a database, comprising:
displaying, in a computer-readable medium, a polynucleotide sequence or polypeptide sequence for a human differentially-regulated breast cancer gene of claim 2, or complements to the polynucleotides sequence,
wherein said displayed sequences have been retrieved from said database upon selection by a user.

The application's sequence listing, which the Patent Office published only in electronic form, follows.

SEQUENCE LISTING (114 sequences)

SEQ ID NO: 1 - DNA, 2624 bp, Homo sapiens
  CDS (1)..(297)
agctcatctctgccgtgctgcagggaaccctatttccttcccctgcagctcagccacctcctcctctcaggtctgccagccatgaaacttctttacctgtttcttgccatccttctggccatagaagaaccagtgatatcaggtaacgtgagcctctctcgggggtctgggttcctggtcatgggcttcccgtctttcccttccctctcactgtgggcatcatctgaagcctttccttctctcctgcagcttcgggaggtttgcccaggatcatctcaagttaatatctctctctgattcttttttgccagagtggtgggatgatagatgtttggagcatctggtgcttgagggccagggtggtatcctggtgggagcttgggagaggtttgaggggcaaagcgtgggtgcaggttggggacttgttgaggacttcgggagactagagtggaagctggggtgagttgtgatgtggaggaaaaaccttgggattggagtgatagaaggaatattaggatgagctggaggtgaggagctgggcttccctgatggtttagggcagagttggagacaggatgggatttggggttgagtggagctggtgttgaggattaggctggggcttgggctgaggctgggagtcggtgctggatgctgcagggtgattgggttcagcttggtcatggcatactgctgggaattgaggttagtgacttgattagattagggttagattagattagattagggtttggcttggagttggggcttgggggcattgagttgagtaaggctgggagttctaattaaggcaggcctgaatgagtttgagtttgaattgggttaatatagggtcaaggaagattgcagattgggatgcggctggagctgaggcttgttgggcttatgtgaaatagggtcaggttattgataagaaacagggtctgtgtaatgtgagtgaatcctcttcgttccctaatattacaggtgatcatgtccttttcccttcatccctagctctgctaggtgggacattaattagcttcagttgattccaaagtaaggagtaggaagttgggggataggaagacagaagggtgagaagtccaaaaaaggctctcccaaaaacttcggagctctcagttggaaccattgtctcagttctcttccctctcaaggtctcttctctcttttcctgggactgggtctggtattactcactcagctggctttcttctcttcttccctgtcctcctgttcctcctctgccttgtcttttctctccgcttgagggatactaacatctgcttaattgttgttcatatgccccaaagtagagtgttggatggatggacactgccggttgttgtgcaaagatggtgaagacagcatcatacgctgccgaaatcgtaaacggtgctgtgttcctagtcgttatttaacaatccaaccagtaacaattcatggaatccttggctggaccactcctcagatgtccacaacagctccaaaaatgaagacaaatataactaatagatagaaatgactttgtttcaggttgcttagggtccacatttcattaaaactcacaaatttgtttctggtgtctgtcaatcataaggaatgatacttcaaatggattgagggtggggggatggcagggggaggtgaagagctagtcgagagaagtcactagggctgggtcatagcgatggtgtgatcattacagtcttgaagatgattccccatctaccagctgcaggagaggctattgagtcaggagtggactggggagaacatggtgggagctgagagatttaaaggcatagcagatgcctaaagagtgggagaatccttaggctgggagagttggtccatcttgagagtgaatgggctgagagtggatggggctgaatataacccaaatccttggggttctagagaaaccagctgatgctttctagtgctcaagaggcccagccccaggggttagaaggtgtctaagtactaaaaaaagataaagcacatgatttgcttatttatatatgaatttgttcattattcattttttccattctttcaccgattcattcattcatattcacttcagctctgccacttactactggcagactctgcatataaacctctcagaacttcatcttcctcctctgtaaattagagtaattgtagaatctatttcaggattgcagtaaggatgaaatgacataataatgcaaagctctggtgaggacagtgggatgctgcctggatactgccaggcaaacgccacatccttcgatgcatgggtaacagtggaatttgtagggcctcttgcaaaaagaacgaacagccctacctctattgcagaaattgtcagtcctgctgcctccagtcctacatgaggataagcatttctggcaaagaggaaaataccgactggtcttatgagaagcagtggccaagactaccttgagtgctggtgattaccattctcaagctctctgggcgcagagacctgctgtcaacccccctcattaaaattcatgtgcctgctaaaaaaaaaaaaaaaaaaaaaaaaaaaaaaaaaaaaaaaaaaaaaaaaaaaaaaaaaaaaaaaaaaa

SEQ ID NO: 2 - protein, 98 aa, Homo sapiens
SSSLPCCREPYFLPLQLSHLLLSGLPAMKLLYLFLAILLAIEEPVISGNVSLSRGSGFLVMGFPSFPSLSLWASSEAFPSLLQLREVCPGSSQVNISL

SEQ ID NO: 3 - DNA, 429 bp, Homo sapiens
  CDS (3)..(341)
agcaaagctcatctctgccgtgctgcagggaaccctatttccttcccctgcagctcagccacctcctcctctcaggtctgccagccatgaaacttctttacctgtttcttgccatccttctggccatagaagaaccagtgatatcaggcaaacgccacatccttcgatgcatgggtaacagtggaatttgtagggcctcttgcaaaaagaacgaacagccctacctctattgcagaaattgtcagtcctgctgcctccagtcctacatgaggataagcatttctggcaaagaggaaaataccgactggtcttatgagaagcagtggccaagactaccttgagtgctggtgattaccattctcaagctctctgggcgcagagacctgctgtcaacccccctcattaaaattcatgtgcctgctaaaaaaa

SEQ ID NO: 4 - protein, 112 aa, Homo sapiens
QSSSLPCCREPYFLPLQLSHLLLSGLPAMKLLYLFLAILLAIEEPVISGKRHILRCMGNSGICRASCKKNEQPYLYCRNCQSCCLQSYMRISISGKEENTDWSYEKQWPRLP

SEQ ID NO: 5 - DNA, 503 bp, Homo sapiens
  CDS (3)..(335)
agcggcccgcagccctgctgataaaagcaaagctcatctctgccgtgctgcagggaaccctatttccttcccctgcagctcagccacctcctcctctcaggtctgccagccatgaaacttctttacctgtttcttgccatccttctggccatagaagaaccagtgatatcagctctggtgaggacagtgggatgctgcctggatactgccaggcaaacgccacatccttcgatgcatgggtaacagtggaatttgtagggcctcttgcaaaaagaacgaacagccctacctctattgcagaaattgtcagtcctgctgcctccagtcctacatgaggataagcatttctggcaaagaggaaaataccgactggtcttatgagaagcagtggccaagactaccttgagtgctggtgattaccattctcaagctctctgggcgcagagacctgctgtcaacccccctcattaaaattcatgtgcctgctaaaaaaaaaaaaaaaa

SEQ ID NO: 6 - protein, 110 aa, Homo sapiens
RPAALLIKAKLISAVLQGTLFPSPAAQPPPPLRSASHETSLPVSCHPSGHRRTSDISSGEDSGMLPGYCQANATSFDAWVTVEFVGPLAKRTNSPTSIAEIVSPAASSPT

SEQ ID NO: 7 - DNA, 1422 bp, Homo sapiens
  CDS (66)..(1280)
ttttttaagactcatggacatagctttaattatctttgcctgacgcccaatacctgaaaattaagatgttcatgcaagataaagaggtaatttttctcctcctcccagtcatcacccgtagcatccggttaagaggctctccacctcgctcattttggtctaactggatttacacaaactcactgtgcacgtgcctggggcgggcaaacccggaaacgacgccgagtcccgcgggatccaggaggagccaactgcgccggaggaggggtttcggccgacacgtcgggattggcggctgcagccagggtcctccgacgctgggcttccgtgagcggcgctctgccagatctctggaccggattcgtcccattctcgtcctcatggtggacaagaaactggtggtggttttcggaggcacaggtgcccagggtggctccgtggcccgcacactcctggaagatgggacattcaaggttcgagtggtgacccgaaaccctaggaagaaggcagcaaaggagctgaggctgcaaggtgcagaagtagtgcagggagaccaagatgaccaggtcatcatggagctggccctgaatggggcttacgccaccttcatcgtgaccaattactgggagagctgcagccaggagcaggaggtcaagcaggggaagctgctcgctgatctggccaggcgcctgggcctccactatgtggtctacagcggcctggagaacatcaagaagctgacggcagggagattggccgccgcgcactttgacggcaaaggggaggtggaggaatatttccgggacattggcgttcccatgaccagtgtgcggctgccctgctattttgagaacctcctctcccacttcttgccccagaaagccccagacggaaagagctacttgctgagcttgcccacaggtgacgttcccatggatggcatgtccgtgtctgacctgggtcctgtggtgctcagccttttgaagatgccagaaaaatacgtcggccagaacatcgggctgagcacttgcaggcacacggccgaggagtacgctgccctgctcaccaagcacacccgcaaggtcgtgcacgatgccaagatgactcctgaggactacgaaaagcttggctttcccggtgcccgggacctggccaacatgttccgtttctatgccctgagacccgaccgtgacatcgagctgaccctgagactcaaccccaaggccctgacgctggaccagtggctggaacagcacaaaggggacttcaacctgctgtgacctgcccgcctcgcggccccttgtggggatcgggggcaccagaggggcagaggcaccaacatctgaataaagccattgttctcccaaaaaaaaaaaaaaaaaaaaaaaaaaaaaaaaaaaaaaaaaaaaaaaaaaaaaaaaa

SEQ ID NO: 8 - protein, 404 aa, Homo sapiens
MFMQDKEVIFLLLPVITRSIRLRGSPPRSFWSNWIYTNSLCTCLGRANPETTPSPAGSRRSQLRRRRGFGRHVGIGGCSQGPPTLGFRERRSARSLDRIRPILVLMVDKKLVVVFGGTGAQGGSVARTLLEDGTFKVRVVTRNPRKKAAKELRLQGAEVVQGDQDDQVIMELALNGAYATFIVTNYWESCSQEQEVKQGKLLADLARRLGLHYVVYSGLENIKKLTAGRLAAAHFDGKGEVEEYFRDIGVPMTSVRLPCYFENLLSHFLPQKAPDGKSYLLSLPTGDVPMDGMSVSDLGPVVLSLLKMPEKYVGQNIGLSTCRHTAEEYAALLTKHTRKVVHDAKMTPEDYEKLGFPGARDLANMFRFYALRPDRDIELTLRLNPKALTLDQWLEQHKGDFNLL

SEQ ID NO: 9 - DNA, 4909 bp, Homo sapiens
  CDS (540)..(1226)
ctctcccctcccttgcgttgcccccctctcccgccgcctcctcccgctctcctctcgctctcctcccgcctccttcttccaggcgcggccagcgggggcaagagcgaggtggctgcgaggaggcgtcactgaaagccctgacttggggaaggctgcgggctcggagccggagacgccgagctggggccgggtgagttgggaatcagactcttgagttgacagctggcctatggtttctgcattttgttaagaagcacctcatgcaagcgagggacctgggactgctcacagccaggtggcatttttctgaagttgttcattaagacttcccagcattcctacagatataaataggtgaggccgcaggcggtgctctgggtccgggagcgctgtccccagcatgaacgcggccggcggcgggagtgaatgactgcagctgcgacttccttcccgggccgcccgagcctccttccccaccgactttcttgttttgattaactccgtggactcctgactctttcttcgcccggaacatcaatatgtgtcatgtcattgtcacctgtcgctcgatgctctggaccttgctgagtattgtggtggcttttgccgagctcattgccttcatgagtgcagactggctgatcgggaaagcgaggagccgcggcggcgtggagccggcgggcccgggcgggggctccccggagccctaccaccccaccctgggcatctacgcccgctgcatccggaacccaggggtgcagcacttccagcgggacacgctgtgcgggccctacgccgagagcttcggcgagatcgccagcggcttctggcaggccacagctattttcctggctgtgggaatctttattctctgcatggtggccttggtgtccgtcttcaccatgtgtgtacagagcatcatgaagaaaagcatcttcaatgtctgtgggctgttgcaaggaattgcaggtctattccttatcctcggtttgatactctaccctgctggctggggttgccagaaggccatagactactgtggacattatgcatctgcctacaaacctggagactgctccttgggctgggccttttataccgccattgggggcacagtcctcactttcatctgtgctgtcttctctgcacaagcagaaattgcaacctctagtgacaaagtacaggaagaaattgaagaggggaaaaatctgatctgcctcctttagtttggaagagacaatgccattttctcccttgagtaatcttgtgaaacagtccacagtttcatcatttgagtcaagtggagaactaacctttacctaccaaagccacgttccacggcccgaggcttaaacaggaccaatgagaggccacatccagctacgcaaagttactggacatgcggtctgcagtgcacattataaggaatggaacatgaaaatagtatataatcctagacctggagttgccaagttctgtcagactccatctcccccaggttcaatgaaggataataatctaaatcattagggcagcagtttctctggtaacggaagagaccgtccgccagatctgcaggctgtttctgctccaacactgcttgcttgtgagcatctctgcctcagaatggggttttgggttggagttcttgttttcctctgttctttcaagttgtctccaacgaacagaaaactataaacttactggggacaggatgtgtgctaaagggcacagcaagacactgtcttttgcttagctgaccaaaggggtcagcagggatggcgtggagtcatgctgtggaacttattctaggctgaatcctagggtaaggtggatcaactgaactgtcactccagagattttagaaatttgagtaaagaaacaataaggacctatacaatcatatgagaacaaaaatatgaaatcttgctagtgaagacgtattttttcttcttcccagcagccaggctagcaccagttctggcccagtctcctcttcttctggagatcacatgtttttcttctaaggttaggattgtgctttgactgcgaaaggaaacctcactgtttcctccttccagggactgaggtctccaagctagctgtggcttatgcagatgttcactgggaggacctgccagaatctcggcacttggggggagacctttactcccagtttggtgaccatgctgtagtcagctctatttccaatcccgacagtagcagaatggcattctacaacaaaaagaagctagttatgggagttaagtttttgtagttactggtgttgatcctgaaagcagactgagataacattaaattgctgcaactgaagaactgcagccaagaccttaattccaggaaagcacagaggacaaagttaattcaaaaagaggcgctagatcaaggtcacagcactgcctacacctgtttacaaaaagaatcaaataccactatgaataaggattcaggggtttttaatctactttccataaattaccaatatcactgattcaggaagatagtatctcagaatgaccagagcagcacagaaacaagctactctgacattatgggagcttcaaaattgtatcatgatacagaaacactccttagcactttaagaaagtgagatggaactgccagatttctggaaggagaaaaagtgtaggtatttgggttcattaatctgctcacttgaggactttgttttgaaaaagtaccttctgtggacaaggtattgtgctaccagctatacaaccctgacttcagagtttgcaaccttgccctgagtgaatcatgttaaagctgtctgagtctaaagcaccgtatcttggtgcagaacagataattatacagagatggaatgggacaaccgcagttttactacattctggtgtttggcctatatgagaaaccatcttctcacagattaagggctaagggcaaaaggggtgggaggtgtggaactagccttaatgagtttcccattcctgaaccaaaattcaaagtgagtgagatgtaaatcctgtgattttggtgaagaaaaaaacgggtatcttcatagcagcctaggaaaccttaaccatatctctaacaccacacagaaagaggctggaggagccactggacaaagcttctgtctctgtgtgtacatttataatgttctaaccaagtctcaaaccttgatgaaaaacacaaaatttttccataaacttatcagaagactcacttttctttctttcttggatagagaaaccattttctgacactaggtttacaatctcagtgtccttacaagttaagtcctaagctcacaggatcctccgagcatgtccatcacctgctctttggctaaggtggcagtgtacctctagatcaacctgggaacagtcacaagggagtgtgacttcttggccataataaactcactcgatagtgtttatgttattaatctgaatgcaacagaagacaaaagcacaggcatgcacacacacagaaccccaaaccactaaaaactacctaaacactgacttagtaaatagtaaaaaggtaatgttgggacttttaaaccttgaatccattagccaggcttgggatgaaaggaccatctaaaatcatgctagtctaaaccatgctcttccacacagctgtttaaaaaccactgggtatgaggaatatgctagaaagaaatgttaaaaatagattgttggctcacacttatttttctaataaataggaccattattactaccaggaaagtcttatttattttgcctgaaattggcttaaagaaagtctcatgacgggatgggatgggctgcgcttctcaatgaactctgaggcagaaatatttgccttggattctgtggattctttaaacctgtgtgctaataattcaaacaatgttgcattaattgtataagggtttttgtatagttttcaaacatctgtggtgtaatgatctttgttaaacatatattctgtaaagtgccatagtctttttttatgtgtagcatatttaaaaatatatatgtatattatacatacacaagtttgtgtgaaagatgtgcaataacaaaggtgtatgtatgttttgttgttttgttttggaaactggacaggagtcaaaacagggatgtttgtttctgttttggcaaggagagttccacatttttgccttcatggcttattcagtaacccataattttaatgctacacaaatcttatgtgaagaaaagactggtatgaaatcattttttcctgggtctaaaataatcgctagtgttatgtcaaagttaagcccgcacgccaggcccagttaatgctagtctttcatgtgaaatgtgaagctgccatgttgccttttctcttagtaggataactagtagctggtacataatcactgaggagctatttcttaacatgcttttatagaccatgctaatgctagaccagtatttaagggctaatctcacacctccttagctgtaagagtctggcttagaacagacctctctgtgcaataacttgtggccactggaaatccctgggccggcatttgtattggggttgcaatgactcccaagggccaaaagagttaaaggcacgactgggatttcttctgagactgtggtgaaactccttccaaggctgagggggtcagtaggtgctctggagggactcggcaccacttgatattcaacagccacttgagccaaatataaaattgtatttacagctgatggactcaatttgagccttcaaacttgtagttatcctattatattgtaaactaatacattgtctagcattgatttggttcctgtgcatatgtattttcactatgtgctcccctccccagatcttaattaaaccagattttgcaattcaaaaaaaaaaaaaaaaa

SEQ ID NO: 10 - protein, 228 aa, Homo sapiens
MCHVIVTCRSMLWTLLSIVVAFAELIAFMSADWLIGKARSRGGVEPAGPGGGSPEPYHPTLGIYARCIRNPGVQHFQRDTLCGPYAESFGEIASGFWQATAIFLAVGIFILCMVALVSVFTMCVQSIMKKSIFNVCGLLQGIAGLFLILGLILYPAGWGCQKAIDYCGHYASAYKPGDCSLGWAFYTAIGGTVLTFICAVFSAQAEIATSSDKVQEEIEEGKNLICLL

SEQ ID NO: 11 - DNA, 636 bp, Homo sapiens
  CDS (85)..(258)
gctttccacaccgcggaagctttgttcttttgctctttgcaataaatcttgctgctgctcactctttgggtccacactgcctttatgagctgtaacaccgcgaaggtccacagcttcactcctgagccagcgagaccacgaaccccaccagaaggaagaatctgtgaacacatccgaacatcagaaggaacaaactctagacatgccgcctttaagaactgcaacactcactgcgagtgtccgcggcttcattcttgaagtcagtgagacgaagaacccaccaattccagacacattttggcgacctagatgggacaatcgcctatcaccgagtggtgagaccatcgcctatagctgagcggcgagacaatcacctatcgccaagcaacaagcagatgaatggtgaaacgatacagcagagaaagagagaagaggaacatttgaacgccgagaggagttcagccgagggtggtcggagaggtttggccacccagcaggaagattatcttcccgtgccatccccgcttccagctctgcatccatccttcagagaaccacctccaccactcaataaaaccctgcattcaaccttcaaaaaaaaaaaaaaaaaaaaaaaaaaaaaaaaaaaaaaaaaaa

SEQ ID NO: 12 - protein, 57 aa, Homo sapiens
MSCNTAKVHSFTPEPARPRTPPEGRICEHIRTSEGTNSRHAAFKNCNTHCECPRLHS

SEQ ID NO: 13 - DNA, 3228 bp, Homo sapiens
  CDS (103)..(276)
gtggcaacctgcttgggtccctttcccaccgtggaagctttgttcttttgctctttgcaataaatcttgctgctgctcactctttgggtccacactgcctttatgagctgtaacactgcgaaggtccacagcttcactcctgagccagcgagaccacgaaccccaccagaaggaagaatctgtgaacacatccgaacatcagaaggaacaaactctagacatgccgcctttaagaactgcaacactcactgcgagtgtccgcggcttcattcttgaagtcagtgagacgaagaacccaccaattccagacacattttggcgacctagatgggacaatcgcctatcactgagtggtgagaccatcgcctatagctgagcggcgagacaatcacctatcgccaagcagtgagtaccatcggacccctttcgcttgctattctgtcctgtctttgcttagagttcgggggctaaatactgggcacctgtcggccagttaaaagtgactagcgcggctgccggactaaagacaagggtgtcaggctttttgggaaagggctttctaacaactcccgactcttcggtgttgagaccattggtttgcctagaaccagcttttgcttttcctgtacttctgggctgagccgagggtcaacagagaggaaagccatgcacctccggggtcccgacaacaagttggttgaccctgcgaccatgagcggaactctcaaaggcatgtcgcccaagcgagactcgcccatctatcctatctatcctgagccttgccccctggttcctaatgcctgccagacaaacttcctctctcctctcttctctgagtttagtcccgcttctaaaaattgctacctgtctctggtgcttttctagtttctcctataagaatgatttctagtatagactccggacacactgcctttaagaactgtaacactcaccacgagggtccgcggcttcattcttgaagtcggtgagaccaagaacccaccaattccggacacaatggaatcatagtgggtcaaagttaggttttcttaatgtcttctgttactgcgtgcgatggcacaactggttgggccagattaccgatctgagtggtgtccactgatccatcaagtgcactgatcttaggttttacaatagtgatgttatccccaggagcaatttggtgaggtttagactcttggagagggaggctgcattatccctaaactgttatttccaatctcgtagctaattggttagtcctagaaaggcagactggaccccaggtaagaagtggggtctttttgggaaagggctgttaccaattttgtttcagagtcaaaccttgagctgaattccttcccaaagttagctcggcctacgcccaggaatgaacaaggacagcttagaggttatgagcaagatggagccagttagggcaaatcttttttcagtgtcttagttataattttgcaatggtggtttcacaactttaaatcatgactatcatagttttcataaataatctaggtaaacaattaaaataaaataattaggtaaatgtaatgggataaatacttgtagacaaactggtcataatttagaatataaagttaaattaaataatagatattttactatttgggcattttccaataaatatatattgtaggaaaacattcttgctaaaaaaaagtgtgtctttaaaaaaaaggtgaacaagtttcgtctaattcaaagcttaaaggttatgtgtaaaacaaggtaaaaggaaccaggaaacaaaaaaagatgcatagaaagttataaaaataaaagagtttttttaggtaaagaagctgaaagaaaagtaattttaggtaagaaagaatcctgcatggtaaatatagtcctaaaataaaataactggttgtttaaaaagaatgttgagaacaaattagaaagtctgaccatgtcatgagcggtcagtataagtcacaataagaggagatatatatatatatatacacacacacatatatacatatcttttatatcatcaggttgtcatattattattgttttggtttgcttagaaatatatatatatatataaaccttgggcacttgtcaggacttcctgaggctgtgtcatgggcgtgtcctcaacgttggcaaaataaactttctgaattaactgagacatgtcttaaattttgggagttcacaagggaaacaagggtaagaattaaacttcactaatatttctcaccctccaaagccacttcaaccactgcctttctcatttcggttaatagcaactccaatcttccagcagtttaggctgcaaaaccttagctcctctctgtcttacacttcacatccaatctgtcacctattcaaagtatcccccaaatcgagcaatttctcaccatctcttactaatacacctcaggtccaaaccaccagtatacctccctagagtactccaatagtctcctaagtagctttcttgcttctatctcccttcagtttattcttaacaaagcagcctgagtggccctttaaaaatataaatccaatcaggtaattcctctgctcattgccttacaatgggccatattttgatatggacaggagacagggaaatactggatagaagagggcagttccctggcaaaggccccaccctcaagcttggagacccatggccttaaatgggaacagccatttctgttttcgcaccccaaaagttgccttttatcctgccatgctcccctatcctgtacccatataaaccccaaacctcgggctccagaagcagatgagcagatgaggagacgcctctattccgtgtcgtttagaatgagcaaacagttgtcttcaccatcccagacaagcagatgaatggtgaaacgatacagcagagaaagagagaagaggaacatttgaacgccgagaggagttcagccgagggtggtcggagaggtttggccacccagcaggaagattatcttcccgtgccatccccgcttccagctctgcatccatccttcagagaaccacctccaccactcaataaaaccctgcattcaaccttcaaaaaaaaaaaaaaaaaaattcttccaggatgctgggcaagagcttgggatacwaaaagtggtcacattggccctctgcccttgtgaaaaggcagagtgtccattgagccgattaacattcaagccatccactgacagcagggctaaa

SEQ ID NO: 14 - protein, 57 aa, Homo sapiens; identical to SEQ ID NO: 12

SEQ ID NO: 15 - DNA, 2079 bp, Homo sapiens
  CDS (370)..(663)
attttgaggtaagaggacactctagctttttgaattgccagagttcttgcactgattttttctcttctggtagggttagtgttccattaactgtagtgtatgttgagtataggcaattggttttgtttctggatgctttcaaagtgccagggctttctctgtccaggatttttatgtatgagtaattcttgtgtttggtttcacaggttatgtatatgtagcaggataaattttgatgttgtagtttgggatgtgatccaatgcatggtgcttaagagtaatggccagtggctagcctaatacccagtggcatggctgttttatacttccttttgtttgcaggtgtgctctatagtgggggtgggagagatgcctctatcaccagatctgctcctgggccctgggggagtctcctgcaatcactgtgtttcttgtgttaggtgttctaggccacaggtctctctcaggcagaggccatttcctaggagccattctggggaactagctgtagtgtttgggttccctgcacaggcttcctccctcttcaactcagcttcattgctgcctctccatccactcagcattttctctctcaagatctgcctaaattacggtggtttactccataatttggtatctgtcagtgggggtggtgcttcctgaccatgtcaaattgaccatctattgtcgcagaatgaaaacctctttgatagactttgtaacatttttgaatattacattcaggagtaaaatcttacgcagtgtgatcccagctatctcttcacttttgagaatagccttaagtaattaaaggataattaaatatgtaattaaaaattgaaaaatagaacagctacacttccagatcccaacttctttcagaaaattttaaaatctctttaaagaaacgtaaattgagaccaaaatagactaatagctttataaaaataagtgctcaaggagggtgttacatgtgaaaattaaacttggaatttgtctttttacccgtaaaattactgagagtaatttccttgaaatggaaataactttacaaatttttaattaacaaaaatgctaaaatattactccgcttacctttatgtaacctcttccttgaaaacaacaatttactcatctggtgtgtgactctaataaccttcaatcattctctacatctgacaccatgactagtaacttagatctttaactaagcaacctttctttccgcctttgtgatattatatctagtaatttaataacaatctatgttgcaaattaaacttccaaattgaatactaattttcaaatcccaaggacccatttctcctgcctcagcatcccgagtacaggcactacaggcacatgaacaagagaagctgacagattcaaatgttcacaaacatttctgttccattttgatagatacataaactatatttctcattcttatatactttatattagggcatgagattaaagtcaaaatagtggaaaattagtagaaataacatattttatatccaatttagtctccaaaatcccaacatgtactcttctatatacatttttcagtatgcttgactggaatggccaattctacagtagtcttggaagcaacatactgcagattaaataccttagtagcctatgttcttgaatgtggacataaaggagcaatgcttttcctatcttaaaaaaaacagtttatatgaatgaaacttctgttctgtttaagatattatatgttgttgagtgtagttgtcaaagcaactagcactattccaagtaatatagaaatcatcagcttgagttgggtctgccataacagcacctaaaacatatccactaaattagtattaaatggacaagtaaaccaaactcagagggttgaaatgaagacttgtaatacccagtgaaaaaaaattattgaaactaccatctaaaattaattggaagcttaatattaactcaaggaaagagtgtgggaaatgaggaaaggcaaaaggtaatgtgttcatgtttgttctgttccataatctaagaaatagataaacacaggcaaaaaaaaaaaaaaaaaaa

SEQ ID NO: 16 - protein, 97 aa, Homo sapiens
MPLSPDLLLGPGGVSCNHCVSCVRCSRPQVSLRQRPFPRSHSGELAVVFGFPAQASSLFNSASLLPLHPLSIFSLKICLNYGGLLHNLVSVSGGGAS

SEQ ID NO: 17 - DNA, 4292 bp, Homo sapiens
  CDS (956)..(1330)
gagagagagagagagagagagagagagagagagagagagagagagagagagagagagagagagagagagagagagagagagagagagagagagagagagacagagagaactagtctcgagttttttttttttttttttttttaactaaaaaggggtcacagaatttcagcagttctctgatttttatattttattcctcttcctatccaatccctgccttttgagtccaggtggtaagtacattttctttaacgtttttcctgcttttcttcccaaatgtgtctttttctttgggctactgtaccctgcttccagtgctgtccccggcataggtccatctctgcagaagccatttcaggagtacctggaggctcaacggcagaagcttcaccacaaaagcgaaatgggcacaccacaggtaagactttaatccggtttcttctcccctctgggaagtttcgggctgaaattacattcacagctctcactcacatttttaggcaaataagtgaagttggtttgccagtgttccttgacagaagttgagcgtctgtgtatgctctactgggaaatttgtctttgtcttagactagaaagtgtaacttctgtacatcttctcctaaaaacaagggtagagccaatggaaagtaatggttctgttacatagaatgagttgttgccttgatcttaaatgatgtattggtagatatacttcccaagtggattaaaaagttaaaacttacagcataacaaagtattagacttactgaggtgacttgaatatctccttttgattttcactctatttttcttttcacccatgggaaaatgataattttttaataaaccaaggctcttaccatagctgaactttaaaacttagactgtcttttctgtaaacgattctgaggcaaagggaaatgactagaagaggatgagtaaacaataacctgaaatgggaaactcgagggaagcacaggttttttttgttttgttttgtttggttcgttttttgttctttggggtttttttgagacagaatttcgctctcgttgcccaagttggagtgcaatggcgcgatcttggctcactgcaacctccgcctcccgggttcaagcgattctcctgcctcagcctcccaagtagctgtgattccaggcacgtgccaccacaccagctaattttttgtattttaatagaaacagggtttcaccgtgttagccaggctggtctcaaactgacctcagatgatccgcccgccttggcctcccaaagtgctgggattacagatgtgagccaccgcgcccggccagagcactgttttttttaatggccttgcactcttcttatggacctttgctgccctcagttgaccaaacatgacatcagaaacagatacatttgtgtgttttaaaaacagctcctaatactggaacaaaaatatttaactgtcttgacaatactcatgagtatctgcatggcgacttcagagttgagtttaatcaaagagtttattcttaggtcctagtagaagagctaacctcacactcatcccattctaaactatgtgattcaacactgattttacatccaacaaagtgaaatcttgatagttgggtgtaaaaaggagagtaatggagatttcagagtagttggggttgcttacttttcatttttaattctttaggttttgtaagttacacacttcaagcattatagatgatcctctttttactactgaactaatgaagcctttttcattgcattgttctgcatttatttctacagggagaaaactggttgtcctggatgtttgaaaagttggtcgttgtcatggtgtgttacttcatcctatctatcattaactccatggcacaaagttatgccaaacgaatccagcagcggttgaactcagaggagaaaactaaataagtagagaaagttttaaactgcagaaattggagtggatgggttctgccttaaattgggaggactccaagccgggaaggaaaattcccttttccaacctgtatcaatttttacaacttttttcctgaaagcagtttagtccatactttgcactgacatactttttccttctgtgctaaggtaaggtatccaccctcgatgcaatccaccttgtgttttcttagggtggaatgtgatgttcagcagcaaacttgcaacagactggccttctgtttgttactttcaaaaggcccacatgatacaattagagaattcccaccgcacaaaaaaagttcctaagtatgttaaatatgtcaagctttttaggcttgtcacaaatgattgctttgttttcctaagtcatcaaaatgtatataaattatctagattggataacagtcttgcatgtttatcatgttacaatttaatattccatcctgcccaacccttcctctcccatcctcaaaaaagggccattttatgatgcattgcacaccctctggggaaattgatctttaaattttgagacagtataaggaaaatctggttggtgtcttacaagtgagctgacaccattttttattctgtgtatttagaatgaagtcttgaaaaaaactttataaagacatctttaatcattccaaaattgtgtccgttttcttgagcgttttgattttttacttttagcttataccagctgaatggcagccttgcctaatccacctacaacaagaatttcttaagctttcttttatttgcatgagagagccactaccaaggcatgttttgttatgctgaaactgggctgctgcatactgctaaatggcacctctgggattggcctacctggggatttcttggtttgtgaaaacaggagaggagaaatatctcatacaagtgaaaggatactggagagagaaattacccatttctaaaaaaaaaccacactctgtcgtatctgtgttaatgttttctagcatgtactctggtttcaacagacacaaatttatatgttaacccagttttcttgccgttctgtaagtgttttattcttagtgtgatttttttccattgggatgtttttgattgaacttgttcattttgttttgcttgggaggaaaataaacaattttacttttttcctttaggagcattatgagcattatgtcagaatagaatagaattggggttcgatcttaacaggccagaaatgcctgggtttttttggtttgtttttgtttttgtttttttatcaaatcctgcctgactgtctgcttgttttgcctaccatcgtgacatctccatggctgtaccaccttgtcgggtagcttatcagactgatgttgactgttgaatctcatggcaacaccagtcgatgggctgtctgacattttggtatctttcatctgaccatccatatccaatgttctcatttaaacattacccagcatcattgtttataatcagaaactctggtccttctgtctggtggcacttagagtcttttgtgccataatgcagcagtatggagggaggattttatggagaaatggggatagtcttcatgaccacaaataaataaaggaaaactaagctgcattgtgggttttgaaaaggttattatacttcttaacaattctttttttcagggacttttctagctgtatgactgttacttgaccttctttgaaaagcattcccaaaatgctctattttagatagattaacattaaccaacataattttttttagatcgagtcagcataaatttctaagtcagcctctagtcgtggttcatctctttcacctgcattttatttggtgtttgtctgaagaaaggaaagaggaaagcaaatacgaattgtactatttgtaccaaatctttgggattcattggcaaataatttcagtgtggtgtattattaaatagaaaaaaaaaattttgtttcctaggttgaaggtctaattgatacgtttgacttatgatgaccatttatgcactttcaaatgaatttgctttcaaaataaatgaagagcagctgtccttctttcctcttttaagtgttcagctgtggcatgctcagaggttcctgctggattccagctggagcggtgtgatacccttctttttcagctgttcgtgccttcctttcttgtatccaccaaagtggagacaaatacatgatctcaaagatacacagtacctacttaattccagctgatgggagaccaaagaatttgcaagtggatggtttggtatcactgtaaataaaaagagggcctgggaattcttgcgattccaaaaaaaaaaaaaaaaaaaaaaa

SEQ ID NO: 18 - protein, 124 aa, Homo sapiens [sequence omitted]

SEQ ID NO: 19 - DNA, 1625 bp, Homo sapiens
  CDS (135)..(839)
ctcaggccggggcgcgaccgcggatccgcagttcccgggccagcctggggcggccggccaggaaccacccgttaaggtgtcttctctttagggatggtgaggttggaaaaaggctcctgtaaccctcctccaggatgaaccacctgccagaagacatggagaacgctctcaccgggagccagagctcccatgcttctctgcgcaatatccattccatcaaccccacacaactcatggccaggattgagtcctatgaaggaagggaaaagaaaggcatatctgatgtcaggaggactttctgtttgtttgtcacctttgacctcttattcgtaacattactgtggataatagagttaaatgtgaatggaggcattgagaacacattagagaaggaggtgatgcagtatgactactattcttcatattttgatatatttcttctggcagtttttcgatttaaagtgttaatacttgcatatgctgtgtgcagactgcgccattggtgggcaatagcgttgacaacggcagtgaccagtgcctttttactagcaaaagtgatcctttcgaagcttttctctcaaggggcttttggctatgtgctgcccatcatttcattcatccttgcctggattgagacgtggttcctggatttcaaagtgttacctcaagaagcagaagaagaaaacagactcctgatagttcaggatgcttcagagagggcagcacttatacctggtggtctttctgatggtcagttttattcccctcctgaatccgaagcaggatctgaagaagctgaagaaaaacaggacagtgagaaaccacttttagaactatgagtactacttttgttaaatgtgaaaaaccgtcacagaaagtcatcgaggcaaaaagaggcaggcagtggagtctccctgtcgacagtaaagttgaaatggtgacgtccactgctggctttattgaacagctaataaagatttatttattgtaatacctcacagacgttgcaccatatccatgcacatttagttgcctgcctgtggctggtaaggtaatgtcatgattcatcctctcttcagtgagactgagcctgatgtgttaacaaataggtgaagaaagtcttgtgctgtattcctaatcaaaagacttaatatattgaagtaacacttttttagtaagcaagatacctttttatttcaattcacagaatggaatttttttgtttcatgtctcagatttattttgtatttcttttttaacactctacatttcccttgttttttaactcatgcacatgtgctctttgtacagttttaaaaagtgtaataaaatctgacatgtcaatgtggctagttttatttttcttgttttgcattatgtgtatggcctgaagtgttggacttgcaaaaggggaagaaaggaattgcgaatacatgtaaaatgtcacgagacatttgtattatttttatcatgaaatcatgtttttctctgattgttctgaaatgttctaaatactcttattttgaatgcacaaaatgacttaaaccattcatatcatgtttcctttgcgttcagccaatttcaattaaaatgaactaaattaaaaaaaaaaaaaaaaaaaaaaa

SEQ ID NO: 20 - protein, 234 aa, Homo sapiens
MNHLPEDMENALTGSQSSHASLRNIHSINPTQLMARIESYEGREKKGISDVRRTFCLFVTFDLLFVTLLWIIELNVNGGIENTLEKEVMQYDYYSSYFDIFLLAVFRFKVLILAYAVCRLRHWWAIALTTAVTSAFLLAKVILSKLFSQGAFGYVLPIISFILAWIETWFLDFKVLPQEAEEENRLLIVQDASERAALIPGGLSDGQFYSPPESEAGSEEAEEKQDSEKPLLEL

SEQ ID NO: 21 - DNA, 8525 bp, Homo sapiens
  CDS (148)..(8181)
  misc_feature (4303)..(4305): Xaa=valine or isoleucine
ggtgggctagaggccgacgccagccagagagcgaaatgttcttttggggccagagtctgggcatatatgaatgcaaatccgtgtttgttcacaactaagcccagctgagacgatcacttttctgtaggccatttgtccaggtacagaatgagcacatgttgttggtgtacgccaggtggtgcttccaccattgacttcctaaagcgctatgcttccaacactccgtccggtgaatttcaaacagccgacgaagacctctgctactgcttggagtgtgtggctgagtaccacaaagcaagagatgaattgccattcttgcatgaggttttatgggaattagaaaccttacgtctcataaatcactttgaaaaatccatgaaggcagaaattggagatgatgatgagttatatatagtagacaataatggagagatgccactgtttgacatcactgggcaagactttgaaaataagcttcgagttcctcttcttgaaatactgaaatatccttacttgcttctacatgaacgtgttaacgagttatgtgttgaagcactttgtcggatggaacaagccaattgctcctttcaggtgtttgataaacatccagggatctatttgtttttagtccatcccaatgaaatggttcggcgttgggctatcttgactgcaagaaacttggggaaagtggacagagatgattattatgacttacaagaagttttactttgcctttttaaagtcattgagttggggcttttagagagtccagacatttatacttcttctgtcctagagaagggtaaactgattcttctgccctcacacatgtatgatactaccaactacaaaagctattggttaggtatttgcatgttgctgaccattcttgaggaacaagccatggattccctgttgttgggctcagacaaacaaaatgattttatgcaatcgatacttcacactatggagagggaagcagatgatgatagtgtggatcctttctggccagcgttacactgttttatggtgattctggatcgccttggatctaaggtctggggtcaacttatggatcctattgtggcatttcaaaccattatcaacaacgcaagctacaatagagagatccgacatatacggaacagctctgtaaggaccaagttagaaccggagtcctatttggatgatatggtgacttgcagccagatcgtatacaattacaatcctgaaaagaccaaaaaggattctggatggagaacagccatttgcccagattattgtcctaacatgtatgaagaaatggaaacattagccagtgtacttcagtcagatattggtcaagacatgcgtgttcataacagcacatttctatggttcatcccttttgtccagtccctcatggatcttaaggatttgggtgtggcttacatagcacaggttgttaatcatctgtactctgaagtcaaagaagtcctcaaccaaacagatgctgtgtgtgacaaagtcactgaattttttcttctaattttggtatcagtgattgaactgcatagaaataaaaaatgtttgcatttgctgtgggtaagttcccagcaatgggtggaagccgtcgtcaaatgtgccaagcttcctaccactgcgtttacacggagttctgagaaatcatctggaaattgctccaaaggaacagcaatgatatcttcactgtcattgcattccatgccatctaactctgtacaacttgcttatgtgcagctgattagaagtctccttaaagaaggttatcagcttgggcagcagtctctttgcaagcgattctgggataagctcaacttattccttagaggaaatttatctctaggttggcagttgactagtcaggaaacccatgagctacaaagttgcttaaagcaaattattagaaacataaaattcaaagcacctccatgtaacacttttgtggatctgacttctgcatgtaaaatctctcctgcatcttataataaagaagaaagtgaacaaatggggaagacgtctagaaaagatatgcattgtttggaagcttccagcccaacattttctaaagaaccaatgaaagtgcaagacagtgtattgatcaaagcagataacactatagaaggtgacaataatgagcaaaattatataaaggatgtgaaactagaggaccatctcttagctgggtcatgcttaaagcagagtagtaaaaacatttttactgaaagagctgaagatcaaattaaaataagtacaaggaagcagaagtctgtaaaagagatctcttcatatacaccaaaggactgtacttcaagaaatggtccagaaaggggatgtgacagaggaataatagtatcaacacgtttgttgactgattctagcactgatgctttggaaaaagtgtccacatcgaatgaagatttctctttaaaggatgatgctcttgctaaaacctcaaaacgaaaaactaaggtacagaaagatgaaatctgtgcaaagttatcacatgtaataaagaagcaacacaggaagagtactttggtcgataatactatcaatttagatgaaaatttgactgtatctaacattgagagtttctattcaaggaaagatacaggagttcagaaaggagatggtttcatacacaatctttctttagaccctagtggtgttctggatgataagaatggagaacaaaaatctcaaaacaatgtattgccaaaagagaaacaattaaagaatgaagaattagttattttctctttccatgaaaacaattgtaaaatacaggaatttcatgttgatggtaaagaattgatcccttttacagaaatgaccaatgcttcagagaagaaatcatctccctttaaagatcttatgactgtacctgaatcaagagatgaggagatgagtaatagtaccagtgtgatttattctaacttgacaagagaacaggcccctgacatcagtcctaaatctgacaccttaacggattctcagatagacagagaccttcacaaattatctttactagctcaagccagtgttattacgttcccatccgattcacctcagaactcatcgcagctgcaaaggaaagtaaaagaagataaaagatgtttcacagctaaccaaaataatgttggagatacctcccgtggacaggttattattatttcagattctgatgatgatgatgatgaaagaatcctgagtcttgagaaactcactaaacaggacaaaatatgccttgagagggaacatccagagcagcacgtttcaacagttaatagtaaggaggaaaagaatccagtaaaggaagaaaagacagagactctttttcagtttgaggaatctgattctcagtgttttgagtttgaaagttcatctgaagtgttttcagtttggcaagatcatccagacgataataattcagttcaagatggtgagaaaaaatgtttggctcctatagccaatactacaaatggtcagggttgtacagattatgtatctgaagttgttaaaaaaggagcagagggcattgaagaacacacaagaccacggagtatttctgttgaagaattttgtgaaattgaagtaaaaaagcctaagagaaaacgatctgaaaaaccaatggctgaagatcctgtgaggccttcatcttctgtcagaaatgagggccagtctgatactaataagagagatcttgtgggaaatgattttaaaagtattgatagaaggacttcaactcccaattcacgtattcagagagccactacggtttcacaaaagaagtcttcaaagctttgtacttgtacagaacccatcaggaaagttccagtttctaagacccctaagaaaactcattcagatgccaaaaaaggacagaatagaagttcaaattacctaagttgtagaacaactcctgctatagtgccgccaaagaaatttcgtcagtgtcctgagccaacttcaacagctgagaaacttggcctgaaaaagggtcctcgtaaggcatatgagttgtcccagcggtctttggattatgtagctcaattacgtgatcatggcaaaactgttggagtagttgatacccgaaaaaagactaaattaatttctcctcagaacctgtctgtcagaaataataagaaacttctgactagtcaagaacttcagatgcaaaggcagatcagacccaaatcacaaaaaaatagacgaagactttctgattgtgaaagtacagatgttaaaagagcagggtcacatacagcacagaattctgacrtatttgtaccagaatctgataggtcagattataattgtacaggaggaactgaggtacttgccaacagtaacagaaaacagttaataaaatgcatgccttctgaaccagaaaccataaaagcaaaacatgggtctccagcaactgatgatgcttgccctttgaaccagtgtgattctgtagtgttaaatggaacagtaccaacaaatgaagtaattgtctccacttcagaagaccctctgggtggaggtgatccaacagcacgtcatatagagatggcagctttgaaagaaggagagcctgactccagcagtgatgcagaggaagataacttatttttaacccaaaatgatcctgaagatatggatttatgttcacaaatggagaatgacaattataaactcattgaactaattcatggaaaagatacagttgaggttgaagaagattctgtaagtcggcctcagttggaatctttgagtggcacaaagtgtaagtacaaagattgtcttgaaaccacaaaaaaccagggtgaatactgcccaaaacactctgaagtgaaagcagcagatgaagatgtatttcgtaaacctggcttgcctcctcctgcatctaaacctttgagacctaccactaagatttttagctcaaagagtacttcacgaattgctggtctttctaaatctttggaaacttcttcagcactttcaccgtctctaaaaaataagtcaaaggggatacagtcgattttgaaagtaccacagccagttcccctcatagctcagaagccagttggtgaaatgaagaattcgtgcaatgttcttcatcctcagtctccgaataattccaacaggcaaggttgcaaagttccatttggtgaaagcaaatattttccatcttcctctccagtaaacattcttttgtcatcacagtctgtctctgacaccttcgttaaagaggtcttaaaatggaaatatgaaatgtttttgaactttggtcagtgtgggccccctgcaagtctttgtcagtccatctcaagacctgtgcctgtcagatttcacaattatggagattattttaatgtttttttccctttgatggtattgaatacttttgaaacagtggcacaagaatggctcaactctccaaatagagagaatttctatcagttgcaagtacgaaaatttcctgccgattatataaaatactgggagtttgcagtttatctggaagaatgtgaactggctaaacagctttatccaaaggaaaacgatttggtgtttttagctcctgagagaataaatgaagagaagaaagatacagagagaaatgacatacaagatctccacgaatatcattctggttatgttcataaatttcgccgcacgtcagtcatgcgtaatgggaaaactgagtgttacctttccatccagactcaagagaactttccggccaatttaaacgaacttgtgaattgtattgtaatcagttctctggtaactacacaaaggaagttgaaagccatgtctctgttgggtagtcggaaccaactggctagagctgttctgaatccaaaccctatggacttctgtacaaaagatttactgactacaacatctgagagaattattgcgtacttaagagatttcaatgaagatcaaaagaaagcaatagaaactgcatatgctatggtgaaacactcaccatcagttgccaaaatctgcttgattcatggaccacctggaacaggaaaatcaaaaactattgttggcctcctctatcgtctactgacagagaaccagaggaaggggcattcagacgaaaactccaatgccaaaatcaaacaaaaccgtgtcctcgtgtgtgcaccttccaatgcagctgttgatgaactcatgaaaaaaattatccttgaattcaaagaaaaatgtaaagacaagaagaatcctttaggaaactgtggagatataaatttagtacgactgggtccagaaaagtctattaatagtgaggttctaaagttcagtttggacagccaagtaaaccacagaatgaaaaaagagttaccttctcatgttcaggcgatgcataaaagaaaggaatttctagattatcagctggatgagctttcccggcagcgagctctatgccgaggtggacgggaaatacagaggcaagaattagatgaaaacatttccaaagtttctaaggaaaggcaggaacttgcttctaaaattaaagaggttcaaggacgcccacagaaaacacagagtatcatcatcttagagtcccatatcatctgctgcacgttgagcacaagtggtggtttactacttgagtctgctttccgtgggcaagggggtgtccccttcagctgtgtcattgttgatgaggctggacagtcttgtgaaattgagactcttactccactcatccatcgctgcaataagctcatcctagtaggagatcctaagcagctccctccgacagtcatctctatgaaagcacaggagtatggctacgaccagtcaatgatggctcgcttctgcagactgctggaagagaatgtagaacacaacatgatcagcaggctgcccattctacagctcactgttcagtacaggatgcatccagacatatgcctcttcccttctaattatgtttataacagaaacttaaaaacaaatagacagacagaagccattcgatgttcatcagattggccatttcagccataccttgtgtttgatgttggagatggttcagaaagacgggataatgactcatatataaatgttcaagaaataaaactggtgatggaaataattaagcttattaaagacaaaagaaaggatgttagttttcgaaacattggcataataactcattacaaggcccagaagacgatgattcagaaggatttggacaaagagttcgatagaaaaggaccagcagaagtagacactgtggatgcattccagggtcggcagaaggattgtgttattgttacgtgtgtcagagcaaatagcatccaaggttcaattggattcctggcaagtttgcagagattgaatgtcaccatcacacgagccaagtacagcctcttcatcctcggacatttgaggaccctgatggaaaaccagcattggaatcagctgattcaggatgctcagaagcgtggtgccattattaagacctgtgacaaaaactatagacatgatgcagtgaagattctgaaactcaagcctgtgctgcagagaagtctcactcaccctcctaccatagccccagaggggtccagaccccagggtggtttgcccagcagcaagctagacagtggatttgccaagacatctgttgctgcttctctataccacacaccctctgactccaaggaaattactcttactgttacttcaaaggaccctgaaagacctcctgttcatgaccaacttcaggacccacgactgctgaagaggatgggcattgaggtcaaaggaggaatattcctttgggatccacaaccctcgagcccccagcatcctggagcaacacctcctacgggcgagccgggcttccctgtcgttcaccaggacctgagccatatacagcagcccgctgctgtagtggctgctctgagcagccacaaacctcccgtgcggggcgaacctccagctgccagtcccgaggcttccacgtgtcagagcaaatgtgatgacccggaagaggagctctgtcacaggagagaggccagggctttcagtgaaggggagcaggagaagtgtggttccgagacccatcacaccaggaggaactctaggtgggacaagaggacactggagcaggaggacagcagttccaagaaaagaaagcttttataggaaagcccagtgacatgggccagcagccacagcatattgtaaactgaagatgaccagctcgtgggaccatctagataagcttgttttttgtaaggagtttgtgtgctgttggaaaacatggaaaatgcatccttaacacctgagcctctggtcatcttcagtattttctgtcatttgcaaaagctttcagagggcattgtgtatccgtaataatgtccttgaagtcagagactggaaatgttgatctcttagtcttctatagacaaggaggtcagactggagtgaatgttgtaaaagttgaaatgtatatttgtatagcaaataacaaaatccttttaaaattt

SEQ ID NO: 22 - protein, 2677 aa, Homo sapiens
  misc_feature (4303)..(4305): Xaa=valine or isoleucine
MSTCCWCTPGGASTIDFLKRYASNTPSGEFQTADEDLCYCLECVAEYHKARDELPFLHEVLWELETLRLINHFEKSMKAEIGDDDELYIVDNNGEMPLFDITGQDFENKLRVPLLEILKYPYLLLHERVNELCVEALCRMEQANCSFQVFDKHPGIYLFLVHPNEMVRRWAILTARNLGKVDRDDYYDLQEVLLCLFKVIELGLLESPDIYTSSVLEKGKLILLPSHMYDTTNYKSYWLGICMLLTILEEQAMDSLLLGSDKQNDFMQSILHTMEREADDDSVDPFWPALHCFMVILDRLGSKVWGQLMDPIVAFQTIINNASYNREIRHIRNSSVRTKLEPESYLDDMVTCSQIVYNYNPEKTKKDSGWRTAICPDYCPNMYEEMETLASVLQSDIGQDMRVHNSTFLWFIPFVQSLMDLKDLGVAYIAQVVNHLYSEVKEVLNQTDAVCDKVTEFFLLILVSVIELHRNKKCLHLLWVSSQQWVEAVVKCAKLPTTAFTRSSEKSSGNCSKGTAMISSLSLHSMPSNSVQLAYVQLIRSLLKEGYQLGQQSLCKRFWDKLNLFLRGNLSLGWQLTSQETHELQSCLKQIIRNIKFKAPPCNTFVDLTSACKISPASYNKEESEQMGKTSRKDMHCLEASSPTFSKEPMKVQDSVLIKADNTIEGDNNEQNYIKDVKLEDHLLAGSCLKQSSKNIFTERAEDQIKISTRKQKSVKEISSYTPKDCTSRNGPERGCDRGIIVSTRLLTDSSTDALEKVSTSNEDFSLKDDALAKTSKRKTKVQKDEICAKLSHVIKKQHRKSTLVDNTINLDENLTVSNIESFYSRKDTGVQKGDGFIHNLSLDPSGVLDDKNGEQKSQNNVLPKEKQLKNEELVIFSFHENNCKIQEFHVDGKELIPFTEMTNASEKKSSPFKDLMTVPESRDEEMSNSTSVIYSNLTREQAPDISPKSDTLTDSQIDRDLHKLSLLAQASVITFPSDSPQNSSQLQRKVKEDKRCFTANQNNVGDTSRGQVIIISDSDDDDDERILSLEKLTKQDKICLEREHPEQHVSTVNSKEEKNPVKEEKTETLFQFEESDSQCFEFESSSEVFSVWQDHPDDNNSVQDGEKKCLAPIANTTNGQGCTDYVSEVVKKGAEGIEEHTRPRSISVEEFCEIEVKKPKRKRSEKPMAEDPVRPSSSVRNEGQSDTNKRDLVGNDFKSIDRRTSTPNSRIQRATTVSQKKSSKLCTCTEPIRKVPVSKTPKKTHSDAKKGQNRSSNYLSCRTTPAIVPPKKFRQCPEPTSTAEKLGLKKGPRKAYELSQRSLDYVAQLRDHGKTVGVVDTRKKTKLISPQNLSVRNNKKLLTSQELQMQRQIRPKSQKNRRRLSDCESTDVKRAGSHTAQNSDXFVPESDRSDYNCTGGTEVLANSNRKQLIKCMPSEPETIKAKHGSPATDDACPLNQCDSVVLNGTVPTNEVIVSTSEDPLGGGDPTARHIEMAALKEGEPDSSSDAEEDNLFLTQNDPEDMDLCSQMENDNYKLIELIHGKDTVEVEEDSVSRPQLESLSGTKCKYKDCLETTKNQGEYCPKHSEVKAADEDVFRKPGLPPPASKPLRPTTKIFSSKSTSRIAGLSKSLETSSALSPSLKNKSKGIQSILKVPQPVPLIAQKPVGEMKNSCNVLHPQSPNNSNRQGCKVPFGESKYFPSSSPVNILLSSQSVSDTFVKEVLKWKYEMFLNFGQCGPPASLCQSISRPVPVRFHNYGDYFNVFFPLMVLNTFETVAQEWLNSPNRENFYQLQVRKFPADYIKYWEFAVYLEECELAKQLYPKENDLVFLAPERINEEKKDTERNDIQDLHEYHSGYVHKFRRTSVMRNGKTECYLSIQTQENFPANLNELVNCIVISSLVTTQRKLKAMSLLGSRNQLARAVLNPNPMDFCTKDLLTTTSERIIAYLRDFNEDQKKAIETAYAMVKHSPSVAKICLIHGPPGTGKSKTIVGLLYRLLTENQRKGHSDENSNAKIKQNRVLVCAPSNAAVDELMKKIILEFKEKCKDKKNPLGNCGDINLVRLGPEKSINSEVLKFSLDSQVNHRMKKELPSHVQAMHKRKEFLDYQLDELSRQRALCRGGREIQRQELDENISKVSKERQELASKIKEVQGRPQKTQSIIILESHIICCTLSTSGGLLLESAFRGQGGVPFSCVIVDEAGQSCEIETLTPLIHRCNKLILVGDPKQLPPTVISMKAQEYGYDQSMMARFCRLLEENVEHNMISRLPILQLTVQYRMHPDICLFPSNYVYNRNLKTNRQTEAIRCSSDWPFQPYLVFDVGDGSERRDNDSYINVQEIKLVMEIIKLIKDKRKDVSFRNIGIITHYKAQKTMIQKDLDKEFDRKGPAEVDTVDAFQGRQKDCVIVTCVRANSIQGSIGFLASLQRLNVTITRAKYSLFILGHLRTLMENQHWNQLIQDAQKRGAIIKTCDKNYRHDAVKILKLKPVLQRSLTHPPTIAPEGSRPQGGLPSSKLDSGFAKTSVAASLYHTPSDSKEITLTVTSKDPERPPVHDQLQDPRLLKRMGIEVKGGIFLWDPQPSSPQHPGATPPTGEPGFPVVHQDLSHIQQPAAVVAALSSHKPPVRGEPPAASPEASTCQSKCDDPEEELCHRREARAFSEGEQEKCGSETHHTRRNSRWDKRTLEQEDSSSKKRKLL

SEQ ID NO: 23 - DNA, 4952 bp, Homo sapiens
  CDS (244)..(3480)
ggcacgaggctgagcactccgcagctgggtgcgcacgggagcctcaaccgcggcgcgtggaggcagtaccagagcgcgcggcgcgcagtcggccggcagccgcgggacagccttggcagaacagccgcggcgggagccccgcagccccgggctgggcccgcgtcccggagcgccaccggagagcgaggacgacgtggaggcggagtggcgcccggcgaggtagcgccaggcgagctggagaccatggccaaaatggaggtgaaaacctcacttctggacaatatgattggagttggggatatggttcttttagaacctctcaatgaggagaccttcatcaacaacctcaagaagcgctttgaccacagtgaaatatacacatacattggaagtgtggttatatctgttaacccataccggtctttacccatttattcaccagagaaagtggaagaatacaggaacagaaatttttatgaactgagccctcacatctttgccctttcggatgaagcatacagatccctacgagatcaagataaggaccaatgtattctcattactggggaaagtggagcaggaaaaacagaggccagtaagcttgtcatgtcctatgtggcagctgtttgtggaaaaggagcagaagttaatcaagttaaagaacagcttttacagtccaacccggtcctggaagcttttggaaatgccaaaactgtaaggaatgacaactcctctagatttggcaaatatatggatattgaatttgactttaaaggcgatccactaggaggagtaataagtaactatcttttagagaaatctcgggttgttaaacagccaagaggtgaaagaaacttccatgtgttctatcagctgctctctggtgcctctgaagagctcctcaataaacttaagcttgagagggatttcagcaggtataactacctgagtctggattcggccaaagtgaatggagtggatgatgcagcaaattttagaaccgtgcggaatgccatgcagattgtgggctttatggatcatgaagctgagtctgtcttggcggtggtggcagcagtgttgaaactggggaacattgagttcaagcccgaatctcgagtgaatggtctagatgaaagcaaaatcaaagataaaaatgagttaaaagaaatttgtgaattgaccggcattgatcaatcagttctagaacgagcattcagtttccgaacagttgaggccaaacaggagaaagtttcaactacactgaatgtggctcaggcttattatgcccgtgatgctctggctaaaaacctctacagcaggttgttttcatggttggtaaatcgaatcaatgaaagcattaaggcacaaacaaaagtgagaaagaaggtcatgggtgttctggacatttatggctttgagattttcgaggacaacagctttgagcagttcattattaattattgtaacgaaaagctgcaacaaatcttcattgaacttactcttaaagaagagcaggaggagtatatacgggaggatatagaatggactcacattgactacttcaataatgctatcatttgtgacctaatagaaaataacacaaatggaatcctggccatgctggatgaagagtgcctcagacctggcacagtcactgatgagaccttcttagaaaagctgaaccaagtatgtgccacccaccagcattttgaaagcaggatgagcaagtgctctcggttcctcaatgacacgtctctgcctcacagctgcttcaggatccagcattatgctggaaaggtgctgtaccaggtggaaggattcgttgacaaaaacaatgaccttctctatcgagacctgtcccaagccatgtggaaggccagccatgccctcatcaagtctttgttccccgaagggaatcccgccaagatcaacctgaaaaggcctcctacagcaggctcacagttcaaggcatccgtggccactctgatgaaaaacctacagaccaagaacccaaactatattaggtgtatcaaaccgaatgataaaaaagcagcacacatcttcaacgaggctctagtgtgtcatcagatcaggtacctggggcttttggagaacgtccgagtgcggagggcaggctacgccttcaggcaggcctatgaaccttgcctagaaagatacaaaatgctttgtaaacaaacatggcctcattggaaaggaccagccaggtctggtgtggaggtcctatttaatgaattagaaattcccgtggaagaatactcctttggtagatcaaagatattcatccgaaacccaagaacattattcaaattagaagacctgaggaagcaacgcctggaggacttggccactctcattcagaagatatatcgggggtggaaatgccgcacacacttcctgctaatgaaaaaaagccaaattgtgattgccgcctggtacaggagatatgcgcaacaaaagaggtaccagcagacaaagagttccgccttagtaattcagtcttatatccggggttggaaggctcgaaaaattctgcgggaactgaagcatcaaaagcgctgtaaggaagcagtcacgaccattgctgcatattggcatgggacccaggtacgtagagaatacaggaaattcttcagagccaatgctggaaagaaaatctatgagtttacgcttcagagaattgtgcaaaaatacttcttggaaatgaaaaataagatgccttccttatctccaatagacaagaattggccctcaagaccttacttattcttggattctactcacaaggagctaaaaaggattttccacttgtggaggtgtaaaaaatacagggaccaattcacagaccagcagaaacttatttatgaagagaaactagaagccagtgaactcttcaaagacaagaaggctttatacccatctagtgttgggcaaccattccaaggggcttacctggaaatcaacaagaaccccaagtataagaaactcaaagatgccattgaagaaaagatcatcattgctgaagtcgtgaacaaaattaaccgtgctaatgggaagagtacatctcggattttcctcttaacaaacaataatctccttcttgctgaccaaaagtctggacaaatcaagtcagaggttccactggtggatgtgaccaaggtatcaatgagctcacaaaatgatggcttcttcgccgtccacctcaaagagggctcagaagcagctagtaaaggagactttctcttcagcagtgatcacctgattgaaatggccaccaagctctatcgcacaactctcagccaaaccaaacagaagctcaatattgagatttccgatgagttcctggtacagttcagacaggacaaagtatgtgtgaagtttattcagggaaaccagaaaaatgggagtgtcccaacatgtaaacgaaaaaacaaccgtctccttgaagttgctgtcccttaactggcgcctcctctctactttcatggacttgttcctttgtaatagtgcaatttggttttgttttatttggggttcattgtatgtttgggaatcaccaaaggcttttagagttctttggcaaaataaaaatatttgactaatcaatttttattattggaatagttttaacctttcaaatacatgttctgtcctggagcaggattgtagaaactaacagtgtctattttcatgtctgatgtgttcttcctttagtcatcatgttaggtctgtgtaccctaaatcagcatattactcataaatcattaattaatataagcataggaaatggtcttaaaagatactgcattcattcatcagatatttattccatgcctactctatgctaggcactgtgctagatggtatgaaaacttattaggaacctttttgtttttgagaccattgcattctggctggtttgtgctggtttaacgacatctaagaaggtttagaaatggtgagaccaaaacaataactgttaatgatggacagcattattaggaaccctgtagtatgatatttaacaatataggcttcaagaagggctggtcctaagagggggcagaaatgaatgaccaggttaaatccctctacatgtggtttctgtttgaaaaaaagaaaactgacatttgaacaggacttttaatttgtttaaaactctggtaattacttgtaacagtagaaaatagaagtcattcttattttagaaaaagtgacagaagcagtccagtaagattatatgtttctgtttctggtaaataccatatatgatcctcgaaatgataatatctccagaatattgttttcacccaaatttgagtagatattttaaacacctaacaaagtaaagggctaaaagccattcagatagcagtaaaacattctgtatgatgtgcaataaaacatccaagatcttttttgaaagttttatttataatatacatttttgtatgagaaaggtgattggtacagggtgcctattttagtcatggatcaaaatttgtgtaacttgcagggctttctttctttttcttcaaatttacaagggttcattttggaaactacattttaaactttggaatcaaattgtttcttatttgggaggataatgtatatacattggtattatgttaaataataaaattgttctaatttggtgccatttcctgaatcacaactgtatttttgtatctcaagctattttcatatgttatgtgtcaatgtatcatctctcagaaaggttttacaatccaaacattatatgttctctgtgtaactgaatttcacttatcttttataaaccagaaacattaattgaaaatattttctggggattttctcttgacttgtatttttaaaaattgctcacataaagaagttctcagaaaaaaaaaaaaaaaaaaaaaaaaaaaaaaaaaaaaaaaaaaaaaaaa

SEQ ID NO: 24 - protein, 1078 aa, Homo sapiens
MAKMEVKTSLLDNMIGVGDMVLLEPLNEETFINNLKKRFDHSEIYTYIGSVVISVNPYRSLPIYSPEKVEEYRNRNFYELSPHIFALSDEAYRSLRDQDKDQCILITGESGAGKTEASKLVMSYVAAVCGKGAEVNQVKEQLLQSNPVLEAFGNAKTVRNDNSSRFGKYMDIEFDFKGDPLGGVISNYLLEKSRVVKQPRGERNFHVFYQLLSGASEELLNKLKLERDFSRYNYLSLDSAKVNGVDDAANFRTVRNAMQIVGFMDHEAESVLAVVAAVLKLGNIEFKPESRVNGLDESKIKDKNELKEICELTGIDQSVLERAFSFRTVEAKQEKVSTTLNVAQAYYARDALAKNLYSRLFSWLVNRINESIKAQTKVRKKVMGVLDIYGFEIFEDNSFEQFIINYCNEKLQQIFIELTLKEEQEEYIREDIEWTHIDYFNNAIICDLIENNTNGILAMLDEECLRPGTVTDETFLEKLNQVCATHQHFESRMSKCSRFLNDTSLPHSCFRIQHYAGKVLYQVEGFVDKNNDLLYRDLSQAMWKASHALIKSLFPEGNPAKINLKRPPTAGSQFKASVATLMKNLQTKNPNYIRCIKPNDKKAAHIFNEALVCHQIRYLGLLENVRVRRAGYAFRQAYEPCLERYKMLCKQTWPHWKGPARSGVEVLFNELEIPVEEYSFGRSKIFIRNPRTLFKLEDLRKQRLEDLATLIQKIYRGWKCRTHFLLMKKSQIVIAAWYRRYAQQKRYQQTKSSALVIQSYIRGWKARKILRELKHQKRCKEAVTTIAAYWHGTQVRREYRKFFRANAGKKIYEFTLQRIVQKYFLEMKNKMPSLSPIDKNWPSRPYLFLDSTHKELKRIFHLWRCKKYRDQFTDQQKLIYEEKLEASELFKDKKALYPSSVGQPFQGAYLEINKNPKYKKLKDAIEEKIIIAEVVNKINRANGKSTSRIFLLTNNNLLLADQKSGQIKSEVPLVDVTKVSMSSQNDGFFAVHLKEGSEAASKGDFLFSSDHLIEMATKLYRTTLSQTKQKLNIEISDEFLVQFRQDKVCVKFIQGNQKNGSVPTCKRKNNRLLEVAVP

SEQ ID NO: 25 - DNA, 6545 bp, Homo sapiens
  CDS (617)..(3052)
ataaatctgtagttctcagtaatattcttgaaaatggtaaatgatcaaatactttggagaccattggtctaaaattactctataacccatttccttggctttttttctcaagacagcaccaggccatctcctgtgctgtctgccattttgttgatgtgtgcagtgtgttggaggccctcacctttgcttgtatcatggccctatgcttatgaagaacgtaatagagtgtttttcataattcaaccaacagctgtacttcctcagttaagctcaaaacagagccaactttgctcctaatgttagtctactgtgtttgtactttcaccttagtacttgtaacatattaccacacatattttcttaccactctgtgtgttctttgaacacaggaagatttttattaatcttagtatttccagcagtgatgatagttccaggtactttgtaggaacttgataatttcttttgcatgaattaatatcttaatgcattaatggcagaatatttctgttatgatttctttttccctaaaagtataaaacaaaacaatattctgtgaataataatcatggtaaggattagcccatacttcttttttcatgccacctaattctgaatgtttcaggtagaacagaagtcccaggagtcagtatcatttaaagatgtgactgtgggcttcacccaggaggagtggcagcacctggaccctagtcagagggctctgtatagagatgtgatgctggagaactacagcaaccttgtctcagtggggtattgtgttcacaaaccagaggtgatcttcaggctgcaacaaggagaagagccatggaaacaggaggaagaattcccaagccaaagctttccagaagtctggacagctgatcacctgaaagagaggagccaagaaaaccaatctaaacatttgtgggaagttgtattcatcaataatgaaatgctgactaaggaacaaggtgatgtaataggaataccatttaatgtggatgtaagttcttttccttccagaaaaatgttctgtcagtgtgattcatgtggaatgagtttcaacactgtttcagaattggttatcagtaagataaactatttaggaaaaaagtctgatgaatttaatgcctgtgggaaattgttactcaatattaagcatgatgaaactcatactcaagagaaaaatgaagttttgaaaaataggaacacactgagtcatcatgaggagactttgcagcatgagaagattcaaactttagagcacaattttgaatacagtatatgtcaggaaaccctccttgaaaaggcagtattcaatacacagaagagagagaacgcagaagagaataactgtgattataatgaatttgggagaactttgtgtgatagttcatccctcttgttccatcagatatctccgtcaagggacaatcactatgaatttagtgattgtgagaagttcttatgtgtgaagtccaccctttctaaacctcatggggtatctatgaaacactatgattgtggtgaaagtgggaataatttcaggaggaaattgtgtctgtcacaccttcagaaaggtgataaaggagagaaacactttgaatgtaatgaatgtgggaaagctttctgggagaagtcacatctcactcgacatcagagggtgcacacaggacagaaaccctttcaatgtaatgaatgtgaaaaagctttctgggataagtcaaacctcactaaacatcaaagatcacacacaggggagaaaccttttgaatgcaatgaatgtgggaaagcctttagccataagtcagccctcacattacaccagagaacacatacaggggagaaaccctatcaatgtaatgcgtgtgggaaaactttttgccagaaatctgacctcactaaacatcagagaacacacacagggctgaaaccctatgaatgttatgaatgtggaaaatccttccgtgtgacttcgcaccttaaagtacaccagagaactcacacaggtgagaaaccttttgaatgtcttgagtgtgggaaatcctttagtgaaaagtcaaatcttacacagcatcagagaattcacataggagataaatcttatgaatgtaatgcatgtgggaaaactttctaccacaagtcattactcaccaggcatcagataattcatacagggtggaaaccttatgaatgttatgaatgtgggaaaaccttctgcttgaagtcagacctcacagtacatcagagaacacacacagggcagaaaccctttgcatgtcccgaatgtgggaaattctttagccataagtcaaccctctctcaacattatagaacacacacaggggagaaaccctacgaatgtcatgaatgtggaaaaatcttttacaataaatcatacctaactaaacataatagaacacatacaggggagaaaccctatgaatgtaatgaatgtggaaaagccttctaccagaagtcacaactcactcagcatcagagaattcacataggggagaaaccctataaatgtaatgagtgtggaaaagctttctgccataagtcagctctaattgtacatcagagaacccatacacaagaaaagccctataaatgtaatgaatgtggaaaatctttctgtgtaaaatcaggacttattttccatgagagaaagcacacgggggagaaaccctatgaatgcaatgaatgtgggaaattcttcaggcacaaatcatcactcacagtacatcacagggctcacacaggagagaaatcttgtcaatgtaatgaatgtggaaaaatcttttaccgtaaatcggaacttgctcaacatcagagatcacatacaggggaaaagccctatgaatgtaacacatgcaggaaaactttctctcaaaagtcaaatctcattgtacatcagagaagacatataggagaaaaccttatgaatgaaatggatattagaaatttccagccacaagtcagcctccataatgcctcagagtattcacactgtggagaaagccctgatgacatcctgaatgttcagtaactatccacaaactcaccttatgttactccaaagtaatagtaggggataaacccatagactacaacaattataggacagcttttgttaggaagtgatattctatgtaatatcagatggttaatacgggcataacaccttacagattttttttgaatttgtgaaagtttttggcaaaaatgcaaataaggttatgttagaatttacactgaggagaaaattgtcaatttaagaaatctaaagtgaaaattttgcttagaaataaaatacgacaagttatgttttgagtttgatgccataatagtttttagggcacctaacaataatttatagatgtatattgtggaatgtaaagctttaagaacttaaacaaaggtaataattaaaataacctcacaagaagtttaatgagtagagagaattcccatgtacacttcaccaaacttcctctaaggataatgtataatcatagtatatggtcaagtccaagaaatcgatgttaccttgctggtagatagagacttagtcagattttactatggtttgcatgcactctgtgtgtgtgtgtacgtgtatgtgtgtgtgtgtggttatatcaaacttttacgacttttacatttgagtaaccatcaacacgattagtttacagaactgaaaaggaatctgagatctgtactgtatcaggattacaaaggatttagcctcaagtagttccctttttgtattaataaccacacgctttctgcaaccctatcccttgcatccacttgactatgaagtttttttaaagcacagataaattgaataatcagggcaatagcattaagcacatctgcgaattatccctgaagttcaaaagacttatatatgtataagtggtatgtgatataaatcgtgtgtttcatatgcataatggaatttaacgtaattgtgaataggaagtaggtatcctagtttagtagtggttacattatcaggcccatcccagatgtttgtgatgtcctgaaacaatttaaaaggagacccacagagctaatgtttatccatttaaaaggtataaatcaaaataacaaattatctaaaaaaaatctatcctgtacatgtgaagatctaggctcgcctccatgttactccctttctcttcctacctgtggctcatgccatgccatgaagtgcctagggtacatatgtgaacattccagccttcagcataagtggtagtccaaattttctttaagcagctgctctccaagacagggccctggaaaggcccacacatacagcccagggctgcccagggctgttggactgtcatttcaaggctcattgtccccagacagggatctgggccctcagacttttgagaatatgaagaggagggttgaggctggagcagaaccagaatcaagctggtgtggggcttttattgatagtgtgaagattgtacactatattacatgatcagatcatacaaataatctaagattatacagtctagtgatcctagattacacaagtaatctaagcttccactttaggaaactagaaaaagaagagcaaattaaatccaaagtaacctgaaaaaacattagagtaaaaatcattgaaattgaaaagagaaaatcgataaaacccaaaactggttccttgaaaaggtcagtaaaattgataaacctctagctagcttaagaacaaacagaagacaaatattgctaataccaaaaatgaaagaggccatcacagctaatcctatggtcaccaaaaggattagaaagaaacatggacaactctgtccataaatttgataacttagctaaaatggaccaattccttgcaagacgcattctctcaaagctcacacaagatagacctcaataggcatatgtatctattaaataaaccaaagcagtaattaataaccttccaaggccaggtacagtggttcatgcctgtaatcccagcacttcactttgggaggctgaggcgggtggatcacaaggtcaggagttcgagaccagcctggtcaacatggtgaaaccccctatctactaaaaatacaaaaaattagctgggcatggtggcatgcgtgtgtagtcgaagctactcaggaggctgaggcagaagaatcacttgaacctgggaggtggatgttgcagtgagctgagattgtgccactgtactgcagcctgggtgacagaatgagactgcatctcaaaaaataataatgaaactttccaaaacaaagtgccaggaccagctgggttcactgatgtgtttttgagatacttaaggtagaaatgataccaagtctctaccatctctttcagaaaataaaagcagagataacacttcccaactcattttgtgaggccagtattaccctaatagcaaaaccaggcaaagatattacaagaaaggaaaactacagatcaatatttccattgaacacagatgcagaaatcctcaaaatattagcaaatcaggaatgcaaggcttgttcaacatttgatattcagtgtaatccattgcatgcattagcagctcaaagatgaaatacgatcatatcaataggtacagaaaaagcatttgacaaaatccaatatccattcatgttaaaacctctcaacacagaaggaatacaggagaacttactcaagttggtaaagaacatactacaaaaaaccctacagctaacattatccttgatgtttccaactagacactttcctactaagatcaggaacatggcaaggaacaccacaccactgcttttcagcattgtactggaagtgctatataatgcagtgttaaaaaaaaaagaaataaaatgcacatagatttgaaaggatgaaatacaactttgttcacaagtaacatgattgtctttgtagagaattctaaataacaaaaaccctgctgacattaataagcaattacagcaggattgcaggatacagtcctcaggtagatgataaaaaggaattggacatcaagtcattaaaagacacggagaaaccctaaatgcttattgttaagtgaaaaccaatctgaaaaggctttctattttgtatgattgcaattatatgacattttgggagaggcaaaactattgagccagtgaaaggaccagtggttgctgagagttgaggggaaaggagggatggcaggtagagaggtgatttttaaggcagtgaaagtactctctagggtactgtaatttgtcaaaacgcagagaatggaaaacagtgaacggaaaacacagagtaaaccctaatgtcaactctggacttcagttaataataatgtatcactgttggctcattaattgtaacaaatgaaccataatgatgcaagatgttaatgattggggagcctgtggaagatgggaggggaaagggttatatgagaattctctatactttttgctcaactttctgtaaccctaaagctactctaaaaaatgaagtgtatcaagtaaataaataaccaaccaacc

SEQ ID NO: 26 - protein, 811 aa, Homo sapiens
MFQVEQKSQESVSFKDVTVGFTQEEWQHLDPSQRALYRDVMLENYSNLVSVGYCVHKPEVIFRLQQGEEPWKQEEEFPSQSFPEVWTADHLKERSQENQSKHLWEVVFINNEMLTKEQGDVIGIPFNVDVSSFPSRKMFCQCDSCGMSFNTVSELVISKINYLGKKSDEFNACGKLLLNIKHDETHTQEKNEVLKNRNTLSHHEETLQHEKIQTLEHNFEYSICQETLLEKAVFNTQKRENAEENNCDYNEFGRTLCDSSSLLFHQISPSRDNHYEFSDCEKFLCVKSTLSKPHGVSMKHYDCGESGNNFRRKLCLSHLQKGDKGEKHFECNECGKAFWEKSHLTRHQRVHTGQKPFQCNECEKAFWDKSNLTKHQRSHTGEKPFECNECGKAFSHKSALTLHQRTHTGEKPYQCNACGKTFCQKSDLTKHQRTHTGLKPYECYECGKSFRVTSHLKVHQRTHTGEKPFECLECGKSFSEKSNLTQHQRIHIGDKSYECNACGKTFYHKSLLTRHQIIHTGWKPYECYECGKTFCLKSDLTVHQRTHTGQKPFACPECGKFFSHKSTLSQHYRTHTGEKPYECHECGKIFYNKSYLTKHNRTHTGEKPYECNECGKAFYQKSQLTQHQRIHIGEKPYKCNECGKAFCHKSALIVHQRTHTQEKPYKCNECGKSFCVKSGLIFHERKHTGEKPYECNECGKFFRHKSSLTVHHRAHTGEKSCQCNECGKIFYRKSELAQHQRSHTGEKPYECNTCRKTFSQKSNLIVHQRRHIGENLMNEMDIRNFQPQVSLHNASEYSHCGESPDDILNVQ

SEQ ID NO: 27 - DNA, 1996 bp, Homo sapiens
  CDS (20)..(619)
acccatccttctttcttttatgcccgcagagagagtagttaagccttcagagcagttccaggagtccatttacgggaggggggagatgagcgctgctgaggcttgggggctcaggtcccgcaccattccccctccgcgacaatctgagagagctccagtggttacttttatctacctgtccgttcaccctaaactgtcactcgtcagtctcactctgagaagagacagtaacttgaaacgttgttctaaactcctaggcccgtcccccaaacacccttttgactgggacccccgcccctgcatgggacctcgcgcagaggggggtgtgtatgtgtgtgagtgtagaggaaggcttggcctaaggcctctccttctccctccccttgcctctggggtgggggtggggtgttgtggctgtgtgtgtggctgtggctccgtcccgggggttctgtcacccggctgtgtccagcctcctctccaccccccatacctaagagtcaccaacccggggtgtgattcaccacccgctggaaccgtgcaacctttccccgaggaagaaggaggaggtagaagccagttgagcagaaatcctctcattaaccactgcgtcacggtgtagtggaagggtgggtgttgtggctttttccctgtgacacacacatccacactcgctcaccctgtgctcactcacggggtcggtgtgtgttatgtgtgttgggtgtgtgtgtgtcggtgtctttgtttgtgtgtctacgcctgtgtgtgtatgtgtcaccccgtaggagtgcgccggtctcggggaaatgcccggttccttcgtgcccacggtcaccgcgatcacaaccagccaggacctccagtggcttgtgcaacccaccctcatctcttccatggcccagtcccaggggcagccactggcctcccagcccccggtcgtcgacccctacgacatgccgggaaccagctactccacaccaggcatgagtggctacagcagtggcggagcgagtggcagtggtgggccttccaccagcggaactaccagtgggcctgggcctgcccgcccagcccgagcccggcctaggagaccccgagaggagacgctcaccccagaggaagaggagaagcgaagggtgcgccgggaacgaaataaactagcagcagctaaatgcaggaaccggcggagggagctgaccgaccgactccaggcggtgaggacaggccctggggtgggagaggggatgctgaggggagctctctccccattctctgccccctctccacctgtacccttatcctgggttgagaactagacgttctacacatggaactaggtactgctgtggccagactgggtagcccagggcacaaacacagacccccatggacttaagtcaactcctggtccccccccccatttcctgaccccacggactactctcctagccttcatttcatcccgaggggccacatggggcccttgaggagaggggcgcccccatcatttctcccatctggtcttcagcaagtaacaacccattttgcctcagtttctccatctctgcaaaccctcatcaaatctcccgggctctttctacccttaacactctggaaagcctgtgaaatgaaattattccacctcctgccctagccacccacagctctcctggtgctggtggcatcccccaaaacccactcccttcctacgtcctcccttggtctgagagttccctgctgtatgcctgcagggtgagctgttactccttgagggaacaagggaattgtcaactttccttctctactttttctcttccccgggaggtagagagggaggggtaatagaagggaacacattaaaaacacataacagtggctcatgcctgtgatcccagcactttgagaggccaaggcaggaggattgcttgagcccaggagtttgagaccagcctgggaaacatagggaggacttgtctctaccaaaaaaaaaaaaaaaaaa

SEQ ID NO: 28 - protein, 199 aa, Homo sapiens
MPAERVVKPSEQFQESIYGRGEMSAAEAWGLRSRTIPPPRQSERAPVVTFIYLSVHPKLSLVSLTLRRDSNLKRCSKLLGPSPKHPFDWDPRPCMGPRAEGGVYVCECRGRLGLRPLLLPPLASGVGVGCCGCVCGCGSVPGVLSPGCVQPPLHPPYLRVTNPGCDSPPAGTVQPFPEEEGGGRSQLSRNPLINHCVTV

SEQ ID NO: 29 - DNA, 3632 bp, Homo sapiens
  CDS (594)..(1307)
cattcataagactcagagctacggccacggcagggacacgcggaaccaagacttggaaacttgattgttgtggttcttcttgggggttatgaaatttcattaatcttttttttttccggggagaaagtttttggaaagattcttccagatatttcttcattttcttttggaggaccgacttactttttttggtcttctttattactcccctccccccgtgggacccgccggacgcgtggaggagaccgtagctgaagctgattctgtacagcgggacagcgctttctgcccctgggggagcaacccctccctcgcccctgggtcctacggagcctgcactttcaagaggtacagcggcatcctgtgggggcctgggcaccgcaggaagactgcacagaaactttgccattgttggaacgggacgttgctccttccccgagcttccccggacagcgtactttgaggactcgctcagctcaccggggactcccacggctcaccccggacttgcaccttacttccccaacccggccatagccttggcttcccggcgacctcagcgtggtcacaggggcccccctgtgcccagggaaatgtttcaggctttccccggagactacgactccggctcccggtgcagctcctcaccctctgccgagtctcaatatctgtcttcggtggactccttcggcagtccacccaccgccgcggcctcccaggagtgcgccggtctcggggaaatgcccggttccttcgtgcccacggtcaccgcgatcacaaccagccaggacctccagtggcttgtgcaacccaccctcatctcttccatggcccagtcccaggggcagccactggcctcccagcccccggtcgtcgacccctacgacatgccgggaaccagctactccacaccaggcatgagtggctacagcagtggcggagcgagtggcagtggtgggccttccaccagcggaactaccagtgggcctgggcctgcccgcccagcccgagcccggcctaggagaccccgagaggagacgctcaccccagaggaagaggagaagcgaagggtgcgccgggaacgaaataaactagcagcagctaaatgcaggaaccggcggagggagctgaccgaccgactccaggcggagacagatcagttggaggaagaaaaagcagagctggagtcggagatcgccgagctccaaaaggagaaggaacgtctggagtttgtgctggtggcccacaaaccgggctgcaagatcccctacgaagaggggcccgggccgggcccgctggcggagtgaagttcaagtcctcggcgaccccttccccgttgttaacccttcgtacacttcttcgtttgtcctcacctgcccggaggtctccgcgttcgccggcgcccaacgcaccagcggcagtgaccagccttccgatcccctgaactcgccctccctcctcgctcggtgaactctttagacacacaaaacaaacaaacacatgggggagagagacttggaagaggaggaggaggaggagaaggaggagagagaggggaagagacaaagtgggtgtgtggcctccctggctcctccgtctgaccctctgcggccactgcgccactgccatcggacaggaggattccttgtgttttgtcctgcctcttgtttctgtgccccggcgaggccggagagctggtgactttggggacagggggtgggaaggggatggacacccccagctgactgttggctctctgacgtcaacccaagctctggggatgggtggggaggggggcgggtgacgcccaccttcgggagtcctgtgtgaggatgaagggacgggggtgggaggtaggctgtggggtgggctggagtcctctccagagaggctcaacaaggaaaaatgccactccctacccaatgtctcccacacccaccctttttttggggtgcccaggttggtttcccctgcactcccgaccttagcttattgatcccacatttccatggtgtgagatcctctttactctgggcagaagtgagcccccccttaaagggaattcgatgcccccctagaataatctcatccccccacccgacttcttttgaaatgtgaacgtccttccttgactgtctagccactccctcccagaaaaactggctctgattggaatttctggcctcctaaggctccccaccccgaaatcagcccccagccttgtttctgatgacagtgttatcccaagaccctgccccctgccagccgaccctcctggccttcctcgttgggccgctctgatttcaggcagcaggggctgctgtgatgccgtcctgctggagtgatttatactgtgaaatgagttggccagattgtggggtgcagctgggtggggcagcacacctctggggggataatgtccccactcccgaaagcctttcctcggtctcccttccgtccatcccccttcttcctcccctcaacagtgagttagactcaagggggtgacagaaccgagaagggggtgacagtcctccatccacgtggcctctctctctctcctcaggaccctcagccctggcctttttctttaaggtcccccgaccaatccccagcctaggacgccaacttctcccaccccttggcccctcacatcctctccaggaaggcagtgaggggctgtgacatttttccggagaagatttcagagctgaggctttggtacccccaaacccccaatatttggactggcagactcaaggggctggaatctcatgattccatgcccgagtccgcccatccctgaccatggttttggctctcccaccccgccgttccctgcgcttcatctcatgaggatttctttatgaggcaaatttatattttttaatatcggggggtggaccacgccgccctccatccgtgctgcatgaaaaacattccacgtgccccttgtcgcgcgtctcccatcctgatcccagacccattccttagctatttatccctttcctggtttccgaaaggcaattatatctattatgtataagtaaatatattatatatggatgtgtgtgtgtgcgtgcgcgtgagtgtgtgagcgcttctgcagcctcggcctaggtcacgttggccctcaaagcgagccgttgaattggaaactgcttctagaaactctggctcagcctgtctcgggctgacccttttctgatcgtctcggcccctctgattgttcccgatggtctctctccctctgtcttttctcctccgcctgtgtccatctgaccgttttcacttgtctcctttctgactgtccctgccaatgctccagctgtcgtctgactctgggttcgttggggacatgagattttattttttgtgagtgagactgagggatcgtagatttttacaatctgtatctttgacaattctgggtgcgagtgtgagagtgtgagcagggcttgctcctgccaaccacaattcaatgaatccccgacccccctaccccatgctgtacttgtggttctctttttgtattttgcatctgaccccggggggctgggacagattggcaatgggccgtcccctctccccttggttctgcactgttgccaataaaaagctcttaaaaacgc

SEQ ID NO: 30 - protein, 237 aa, Homo sapiens
MFQAFPGDYDSGSRCSSSPSAESQYLSSVDSFGSPPTAAASQECAGLGEMPGSFVPTVTAITTSQDLQWLVQPTLISSMAQSQGQPLASQPPVVDPYDMPGTSYSTPGMSGYSSGGASGSGGPSTSGTTSGPGPARPARARPRRPREETLTPEEEEKRRVRRERNKLAAAKCRNRRRELTDRLQAETDQLEEEKAELESEIAELQKEKERLEFVLVAHKPGCKIPYEEGPGPGPLAE

SEQ ID NO: 31 - DNA, 2669 bp, Homo sapiens
  CDS (314)..(1828)
ggccacgttcagcggacacgggagcaagatggcgattccgggcaggcagtatgggcttattttgccaaagaaaacacagcagttgcaccctgttttgcaaaaaccatcagtgtttgggaatgattctgatgatgatgatgagatggggtttcactcttgttgcccaggctggagtgcaatggtgcaatctcggctcaccgcaacctccacctcctgggttcaagcgattttcctgcctcagcctcccaaatagctgcaattacagacctctgtgagtgaaagccttcagagggaagctgctaagaagcaggccatgaaacagaccaaactggaaatccagaaggcccttgcagaagatgctactgtgtatgaatatgacagtatttatgatgaaatgcagaaaaaaaaggaggaaaataatcccaaattgcttttggggaaagacagaaagcccaagtatattcacaacttgctaaaagcagttgagatcagaaaaaaggaacaggaaaaaagaatggaaaagaaaatacagagagaacgagaaatggaaaagggggagtttgatgataaagaagcatttgtgacatctgcatataagaaaaaactgcaagagagagctgaagaagaagaaagagaaaagagggctgctgcactggaagcatgtttggatgtaaccaagcagaaagatctcagtggattttataggcacctattaaatcaagcagttggtgaaaaggaagtacctaaatgcagctttcgtgaagccagatctggtataaaggaagaaaaatcaaggggcttctccaatgaagtaagttcaaaaaacagaataccacaagagaaatgcattcttcaaactgatgtgaaagtagaggaaaacccagatgcagacagtgacttcgatgctaagagcagtgcggatgatgaaatagaagaaactagagtgaactgcagaagggaaaaggtcatagagacccctgagaatgacttcaagcaccacaggagtcaaaaccactctcggtcacctagtgaagaaagagggcacagtaccaggcaccacacgaaaggatcacgaacgtcgagaggacatgagaaaagggaagatcagcaccagcagaagcaatccagagaccaagagaaccattacactgaccgtgattaccggaaagaaagggattctcataggcacagagaggccagtcatagagattcccattggaagaggcatgaacaggaagataaaccaagggcgagggaccaaagagaaagaagtgacagagtatggaaaagggagaaagatagggagaaatattcccaaagagaacaagaaagagatagacaacaaaatgatcagaaccgacccagtgagaaaggagagaaggaagagaaaagcaaagcaaaggaagagcatatgaaagtaaggaaggaaagatatgaaaataatgataaatacagagatagagaaaaacgagaggtaggtgttcagtcttcagaaagaaatcaagacagaaaggaaagcagcccaaattctagggcaaaggataaatttcttgaccaagaaagatccaacaaaatgagaaacatggcaaaggacaaagaaagaaaccaagagaaaccctctaattctgaatcatcactgggagcaaaacacagactcacagaggaagggcaagagaagggtaaagaacaagagagaccacctgaggcagtgagcaagtttgcaaagcggaacaatgaagaaactgtaatgtcagctagagacaggtacttggccaggcagatggcgcgggttaatgcaaagacctatattgagaaagaagatgattgatggctaccccaagagaaagatttaaggaagcacagaaaactgtaattcctggaacctgctgcgtaaaaccataaaggagtgtgttaccagtagtttggagggcatttttaaatttattttcaaaattttaagttaaaagtcagtcttacagcttggatgtttggatgtggatgtttggctgaatttatatatagtgtgtactcatcaataccacattctttgttgtattcaagaaccgttaagagtgtgctaattccctgtaggtacataatgaggaaaatttgctccactacaaccattaaaaaataattttggccagatacggtagctcgtgcctgtaataccaacattttgggaggccaaggcagaaggatattgaggctaggcattcaagaccagcctaggcaggataataagaccttgtctctatttaaaaaacaaaaagcctagcatggtagtccatgcctgtagtcccagctgttcgagaggctgaggcaagaagatcacttgagcctaggaatttgatgttacagtgaggtatgatcatgccactgcactccaacctgggcaacagaatgagaccctgtctctaaaaaattttttttaaataaataatttaactcttctaataatgttttgttgcaggaaatgtatttcagataaaatatggatttgaaaaacagaaaatatactttatgttctgaaatttgtatttaagtataaaatgtgaatcatcttgtctaaatagcttacagcatagttggcttaaatgaaaataaaatgatatgcttatacatttggaaaaaaaaaaaaaaaaaaaaaaaaaaaaaaaaaaaaaaaa

SEQ ID NO: 32 - protein, 504 aa, Homo sapiens
MKQTKLEIQKALAEDATVYEYDSIYDEMQKKKEENNPKLLLGKDRKPKYIHNLLKAVEIRKKEQEKRMEKKIQREREMEKGEFDDKEAFVTSAYKKKLQERAEEEEREKRAAALEACLDVTKQKDLSGFYRHLLNQAVGEKEVPKCSFREARSGIKEEKSRGFSNEVSSKNRIPQEKCILQTDVKVEENPDADSDFDAKSSADDEIEETRVNCRREKVIETPENDFKHHRSQNHSRSPSEERGHSTRHHTKGSRTSRGHEKREDQHQQKQSRDQENHYTDRDYRKERDSHRHREASHRDSHWKRHEQEDKPRARDQRERSDRVWKREKDREKYSQREQERDRQQNDQNRPSEKGEKEEKSKAKEEHMKVRKERYENNDKYRDREKREVGVQSSERNQDRKESSPNSRAKDKFLDQERSNKMRNMAKDKERNQEKPSNSESSLGAKHRLTEEGQEKGKEQERPPEAVSKFAKRNNEETVMSARDRYLARQMARVNAKTYIEKEDD

SEQ ID NO: 33 - DNA, 1230 bp, Homo sapiens
  CDS (103)..(678)
ccacctcctacctgccgggcgggacgagcaacatgattggtggaatcgagtaattactgatcagtattgtccaatcacggagggcagtttagagccggcccaatgagggcctccaggggcgggtcggactgccgcgggccggggagcgctctgggtggccagctgtgggcccgggccgtcgtgggctccggcttgcgtgcggagatgagcgggtccctcggccgagctgcggcggctctgctccgctgggggcgcggcgcgggcggcggtggcctttggggtccgggcgtgcgggcggcgggctcgggcgcgggcggcggcggctcggcggagcagttggacgcgctggtgaagaaggacaaggtggtggtcttcctcaaggggacgccggagcagccccagtgcggcttcagcaacgccgtggtgcagatcctgcggctgcacggcgtccgcgattacgcggcctacaacgtgctggacgacccggagctccgacaaggcattaaagactattccaactggcccaccatcccgcaagtgtacctcaatggcgagtttgtagggggctgtgacattcttctgcagatgcaccagaatggggacttggtggaagaactgaaaaagctggggatccactccgcccttttagatgaaaagaaagaccaagactccaagtgagggcggccaagtcctcgctgagcagagagggagccgttcatgtcagagactcactgccagaaaagccttacccattttggttttcactattgagaccgcaactgcttgcactgatcattttggttcatgagcagttggtgattttagttggtctggtgttcgggctaagaatattttattgtggacttaattacaaccactgcactgtaatgattcaatgctgtattatgatattgctgtaaacaaaattcattcttatattgtcacttattctttgcctgattcagaagttaaataggagctttggaatcattattcatgacccctctgcaaatgtgtcagtctccaaagagagtatctccccccaaattttgtgtagcttcttttgttatggaaaatggtggacaaaaaaagaaactgtgataactggggcgttgttttttaaaataaactccagcacagggatgctgtgcatgcctgagttgattccgaaaaaaaaaaaaaaaaaaaaaaaaaaaaaaaaaaaaaaaaaaaaaaaaaaaaaaaaaaaaa

SEQ ID NO: 34 - protein, 191 aa, Homo sapiens
MRASRGGSDCRGPGSALGGQLWARAVVGSGLRAEMSGSLGRAAAALLRWGRGAGGGGLWGPGVRAAGSGAGGGGSAEQLDALVKKDKVVVFLKGTPEQPQCGFSNAVVQILRLHGVRDYAAYNVLDDPELRQGIKDYSNWPTIPQVYLNGEFVGGCDILLQMHQNGDLVEELKKLGIHSALLDEKKDQDSK

SEQ ID NO: 35 - DNA, 2492 bp, Homo sapiens
  CDS (306)..(1409)
agcactcccgccctagcaacgtgcgcctgctgctaggggcggaggcgcgggagggctcggaggctgttcccacccccaggctccgcgttcccgccggccccagctccagccccgcagcccaccgtgcaaacatgcttagacagagaagagattaacttcagtggcttcccactaattacagagattaagaagtggctgcctgaactattttccaaaggatacacattacaaattattgaatagggcagctaaccaagaagatcctattggtttggggggaacacaacttccagcagccacaagggatgctgctactcaggtgccaactgaaacaagctcctccacagaaggtttcgtttaggttttgtgtcgtgatggggaaacagcaaagcaaactcaaacacagcacttataaatacggcaggcctgatgaaattatagaagagagaattcaaactaaagcttttcaagagtatagcccagctcacatggataccgtctctgtcgtggctgctttgaactcagacctttgtgtctctggagggaaagataagacagttgtggcctataattggaaaactggaaatgtggtgaaaaggttcaaaggacatgaacatgagatcaccaaggtagcctgtattcccaaatccagccagttcttcagtgcctctcgtgacaggatggtcatgatgtgggacttgcacggttcctcacaaccaaggcagcaattgtgtggccatgccatggtggtcaccggattggctgtgagtccagactcatcacagctgtgcactggctctcgggacaacaccctgcttctgtgggatgtggtgacaggacagagtgtggaaagagcatctgtctccaggaacgtggtcactcacctgtgctgggtccccagagaaccatacatactacagacctctgaagataaaaccctcagattatgggacagtcgggggctgcaggtagctcatatgtttcctgcaaagcagcacattcagacctactgtgaagtcagtgtggatggacacaagtgtatctcctgcagcaatggctttggaggagaaggctgtgaagccacgttgtgggacctaagacagactcgaaacagaatatgtgagtataaggggcatttccagactgtcgcatcctgcgtctttctaccaagagcattggccttgatgcctttaattgctacctcatcacatgattgcaaggtgaagatttggaaccaagatactggagcctgccttttcaccttgtctctggatggatcaggacccttgacttctctggctgttggtgacgccatctccttattgtgtgcaagttttaacagaggaattcacttactcagaatggaccacagccaagggctggaactgcaggaagtggcagcattctgaggccaagagacactcactggacaatatcaaaccatggctcctcctcagcatggctttgtgtctttcccagttatcttgaggggagtgggatgtagggctggtattctttgcttaggttcatttacaagatgtatcagtgttgtaagtccaataatttaagtccagtgattcaaaatcaggtatagagtccagaaacatggactacacataaggttctctatttaagttaaatacaaatgcaactttttagtgagcttttaggactactcttcaaaaaaagtgtattgctcagaatgatgacctgtaaatgtaagagtggcaggcctctgtctgtgaaagtcagaacacagggctcgagcctctggaactgaccctttgcaagtctttacaaaagaaaaaaggcagtggggagagagagtgttttggttacatcagaaataattgagatgggaaagaatagtgcagctccatagaggagacggactgtagacaatgagattaagcttcaatcactgctcctcagcaatgtgaagaatcaaagtcagggcaagaaagcgaaagcttggacttctattcaaagtggcagcagagtgggagggcggtacccttctagcccagtgctgctgagcttgtgtgaaaatcagacctgagatggcttgaagcagccaagaaccacatgggcattgcccagaattacaggagttagcacaccagctctacagataagaaaacattgaaattcaaagattaaggccaaaaatatctcacttgcaattttaatattttcatttggatttatataaatgaaacatatatatgttttggaatggccagagtgaggcaaaggggatccctgaaataacattagaacatacaggaaaaacgaggcaggcagatcactttaggtcaggagttcaagaccagcctgtacgtgcgtgcctgtagtcccagctactcgggagggtgagatgggagaatcacttgaacctgggaggcagagtttgcagtgagctgagattgtgccactgcactccagtctgtgtgacagaatgagaccttgtcttgaaaaaaaaaaaaaaaaaa

SEQ ID NO: 36 - protein, 367 aa, Homo sapiens
MLLLRCQLKQAPPQKVSFRFCVVMGKQQSKLKHSTYKYGRPDEIIEERIQTKAFQEYSPAHMDTVSVVAALNSDLCVSGGKDKTVVAYNWKTGNVVKRFKGHEHEITKVACIPKSSQFFSASRDRMVMMWDLHGSSQPRQQLCGHAMVVTGLAVSPDSSQLCTGSRDNTLLLWDVVTGQSVERASVSRNVVTHLCWVPREPYILQTSEDKTLRLWDSRGLQVAHMFPAKQHIQTYCEVSVDGHKCISCSNGFGGEGCEATLWDLRQTRNRICEYKGHFQTVASCVFLPRALALMPLIATSSHDCKVKIWNQDTGACLFTLSLDGSGPLTSLAVGDAISLLCASFNRGIHLLRMDHSQGLELQEVAAF

SEQ ID NO: 37 - DNA, 3288 bp, Homo sapiens
  CDS (267)..(653)
gaagtgtttggtgcacaaactgaattttgaaatatttaaattttctttcatttgcttacagctatttgtacagtttattgtaagataagaatgaaaatcaggtgttaaagcaaagagtacaaaactattctatgtcctgtctcttttcagttgcttctccaagcattagacttctctaggcaaagtcctttcataacactagagattcattatatttggtagttcatgaaattttaacaagacacacttctgtttgtgggattggaatgcgtgttggtgagtgtccgaatttaaatatattggtattcatatggattcaggatttattttcaaagaacagatattcactagaccaaactaacctgtactcaaacttgaaagaaatagaaatagaaaaagcagaggataactttgtagagttaattcctgatatactggtctctaaagtttcttgttgtccgataaatattaatttagcacctgctgggtttcaggcaggaactgtggaagaacttataaagggtatgaaaatgagtatatcaagatttctgtactcaagttatatacagttagctgtaggtgataagacaggtatggtgacagctaaaatacaatcagacttccataaaagaggtgaagggagacgagaatgattatgattgtttaaagaggaacagatcacatggtgttgagaaaaccgacttagttgtcccaaaaggttttctgagcttgtttcggaaaggaagactggacttttagcaggtgaatatgacagcatgaagggtaagccaatatagaagaaacaatgtaagattacaaggggcattttcaggatataggaaagagaaaagcttgatgaaaagttaggtatagtatagtatggggagctaagacttgacataaaggttaggataattttctaaaatgtttatttgaaaaactttatctcagaaggaaatagggaaccattccaggatttgggcaaaggataatttgatgaaacctttaatagggttaatatgaccatcttacataggttgacatggaaaggaggtggacggggttgaggtgacgaagactcattagtaggctgatctcttactctatgagtaataacagggagcctacactaggataatgatgttgggaagtgatttctgtagctatgctgagcagacagtcttcaagagttagcaaagtttatatgtgcgggtgacaaaaaagaggctttgagttttgatgactgaaaggagacaaataatagctaatctttgataaagactaactatgggcaaggctttactctttgtttgtagtaacttacttaatcctcattataacccctttatatagatgctgtattttctccattttacagagaggaagtagagcctcagagatgttatgtcacttgtcaaaagtcacccagctagtgaatggctggatcaaactggatcatgtccaagtagcctgggcaacagagcgagactgtctcaaaaaagagaaaaaaaagaaaaaaaaaaagaaagcctgagagaattgggttttatggttacaaataaattttaggccagtttacaagtgcagaatctctaaatagtgaggattggctatatgtgttttctcaaatatcagttcttttcgtgtgccttggtctttatcttctgcgccacttgtttttcttgggtgtctgctgatctttgcttatttatatttatgagtgagtgactgttactgctattagagcaaactggtattggcatttttctcctgctgggtgctctgttgtgttaacaacttactctcttaactagggaggctgactgaattttgtggaatgggtggagtgggttgacagggtttcctaaggatgtgtgagccaagagcaggctggggcaccctccaactgacaaagcaagaaagattttccgttgagcacgatgaaccattggggcgcagttccttcctccctgcccctttccctgttggttttggagtgctcctttatttccagctcttaccttttctttttcaagttctaattgtctcactaagacaatgttttttgaccaaatcactccatgattgtccgtgactcatttatattctttgcatttattaattggaggttggaccttctggaattttctacttactgatggtgatacggactcttttttcctttgtattttctttctcagtctgatctgcttcctgacttcctggaaaccctccaaatttcttgatttctaatggcactctttctagatttctagccctgtacgataatattctttcatcatttcagtgggcttttggagggaggcggagatccaggtgatatgtctacactattcagtcagaaagctggatggtttttctcactgtttagctgtgactcatacttagaaagtggtttaaatgtgaatatcttagttctggttgtacaattgaggtaatcctcaattcaggttgctgtctggacatttcatgactggatttaaaaatatttttaaggccaggtggggtggctcacgtaattccagcactttgaaaggctgaggcgggcagatcacctaaggtcgggagttcgagaccagtctgaccaacatggagaaaacccctctctactaaaaatacaaaattagctgggtttggtggcacatgcctgtaatgctagctactcaggaggctgaggcaggagaatcattgaacctgggaggtggaggttgcggtgagctgaaatcacgccattgcactccaccctgggcatcaagagcaaaactctgtacccgcccccccccccccccccacctcaccaaaaagaaaaaacaacaaagaatttttaaaatctcacatttttttagctgggtgtggtggtgcacacctggaatcccagctacttgggaggaggattgcttgagcccagaagttcaagtccagcctgggcaacatagtgagactccagtctcaattaaaaaaaaaaatcttggccaggcatggttgtttacgcctgtaatcccagcactttgggaggccgaggtgggcggatcatgaggtcaggagatcaagaccatcctggccaacatggtgaaaccttatctttactaaagatacaaaaattagctgggcgtggtggcgcgtgcctgtgatcccagccacttgggaggccgaggcacgagaatcgcttgaatccaggagatggaggttgcagtgagccgagatcatgccactgcactccagcctggcgacagagtgagactccatctcaaaaaaaaaaaaaaaaaa

SEQ ID NO: 38 - protein, 128 aa, Homo sapiens [sequence omitted]

SEQ ID NO: 39 - DNA, 6956 bp, Homo sapiens
  CDS (322)..(4335)
gacgaggccggaggagcttcgaggctgctcttcctcggccagacggagagcggcactgtctccccgcccagcgctcactcgccccgcgtctccccccgcggcggctgctcctcctcggcaccgccagccccagcgccgctcccgggcgggcgggcggcggcggcggcggcggcggcgggacccgcggagccgctttgtgtgcagcccgactaggggcggcggcgcaaccacctgacagaggcccgggcgctcgatgcaccttccgcccgcatgaggaggagaggccggtagaggactgtgaaccaaaagttgtcccccaggatggacttcaccgcgcagcccaagcctgccactgccctctgtggcgtcgtgagtgccgacgggaagatcgcttaccctccgggggtaaaagagatcaccgacaagatcaccacggacgagatgatcaaacgcctgaagatggtagtgaaaacctttatggatatggatcaggactcagaagatgaaaaacagcagtatctcccactagccttgcatcttgcatctgaattcttcctcaggaaccccaataaagatgtgcgtctccttgtagcatgttgtttggctgatatctttcgtatctatgccccagaagctccatatacttcccatgataaacttaaggacatatttttgtttattaccagacaattaaaaggtttggaggatacaaagagtccacagtttaatagatacttttatttattagagaatttagcttgggttaaatcatataacatctgctttgaattggaagattgcaatgaaatttttattcagctttttagaactctcttctcagtgatcaacaatagccacaataagaaggtacaaatgcacatgctagatttgatgagttctatcatcatggaaggtgatggagttactcaagaattattggactccattcttattaacctcattcctgcacataagaacttaaataaacagtcctttgaccttgcaaaagtgctattgaaaagaacagtccagactattgaggcatgcattgctaattttttcaatcaagtcctggtgctgggaagatcatcagtaagtgatttgtcagaacatgtatttgatctgattcaggaactttttgctatagatcctcatttattattatccgtcatgccacagcttgaattcaaactaaagagcaatgatggagaagagcgattagctgttgttcgacttctagctaaattgtttggctccaaagattctgatttggcaacacagaatcgtcctctttggcaatgttttcttggacgatttaatgatattcatgttcctgtgagattagaaagtgtgaaatttgccagtcattgtttaatgaatcacccagatttagcgaaggatctcacagaatatttaaaggttagatcacatgatccagaagaagctattcgtcatgatgtcattgttactataataacagctgccaagagggacctggccttagtaaatgatcagctgcttggctttgtaagggaaagaacactggataaacggtggcgagtaagaaaagaagctatgatgggtctggctcagctttataagaaatactgtcttcatggtgaagcaggaaaggaagctgcagagaaagtcagctggataaaggacaaacttctgcatatttattatcagaacagcattgacgacaaactgttggtagagaaaatctttgctcagtatcttgtcccccacaacctggaaacagaagagagaatgaaatgcttatattacttatatgctagtttggatccaaatgctgtaaaagctctcaacgaaatgtggaagtgtcagaacatgcttcggagccatgtacgcgaactattggatttgcacaagcagcctacatcagaggctaactgttctgccatgtttggaaaactgatgaccatagcaaagaatttgcctgaccccgggaaagcacaagattttgtgaagaaatttaaccaggttctcggcgatgatgagaaacttcggtctcagttggagttattaattagcccaacctgttcttgcaaacaagcagatatttgtgtgagagaaatagcccggaaacttgcaaatcctaagcaaccaacaaatccttttctagagatggtcaaatttctgttggaaagaatcgcacctgtgcacattgattcagaagccataagtgcactagtgaaattgatgaataagtcaatagaggggacagcagatgatgaagaggagggtgtaagtccagatacagctatccgttcaggacttgaacttcttaaggttctgtcttttacacatcctacctcgttccactctgcagagacatatgagtccttgttacagtgcctaagaatggaggatgacaaggtagcagaagctgctattcaaatttttagaaatacaggtcacaaaatagaaacagaccttccccagatacgatcgaccttaattcccattttacatcaaaaagcaaagaggggtactccacaccaagcaaaacaggctgtgcactgtatacacgccatattcacaaataaagaagtccagcttgcacagatttttgagccactcagtaggagtctgaatgctgatgtgccagaacaacttataactccattagtttcattgggccacatttctatgttagcaccagatcagtttgcttccccaatgaaatctgtagtagcaaattttattgtgaaagatctgctaatgaatgacaggtcaacaggtgaaaagaatggaaaactgtggtctccagatgaagaggtttcccctgaagtactagcaaaggtacaggcaattaaacttctggtaaggtggctgttgggtatgaaaaacaaccagtctaaatctgccaattcaacccttcggttattatcagcgatgttggttagtgagggtgacctgacagagcaaaagaggatcagtaaatctgatatgtctcgcttgcgattagctgctggtagtgccataatgaagcttgctcaggaaccttgttaccatgaaattattaccccagaacagtttcagctctgtgcacttgttattaatgatgagtgttaccaagtaaggcagatatttgctcagaagctgcataaggcacttgtgaagttactgctcccattggagtatatggcgatctttgccttgtgtgccaaagatcctgtgaaggagagaagagcacacgcacgacaatgtttactgaaaaatatcagtatacgcagggaatacattaagcagaatcctatggctactgagaaattattatcactgttgcctgaatatgtagttccatacatgattcacctgctagcccatgatccagattttacaagatcacaagatgttgatcagcttcgtgatatcaaagagtgcctatggttcatgcttgaagttttaatgacaaagaatgaaaacaatagccatgcctttatgaagaagatggcagagaacatcaagttaaccagagatgcccagtctccagatgaatccaagacaaatgaaaaactgtatacagtatgtgatgtggctctctgtgttataaatagtaaaagtgctttgtgcaatgcagattcaccaaaggacccagtcctcccaatgaaattttttacacaacctgaaaaggacttctgtaacgataagagttatatttcagaagagacaagagtacttctgttaacaggaaagccaaagcctgctggagtactaggtgcagtaaataagcctttatcagcaacgggaaggaaaccctatgttagaagcactggcactgagactggaagcaatattaatgtaaattcagagctgaacccttcaaccggaaatcgatcaagggaacagagttcagaggcagcagaaactggagttagtgaaaatgaagagaaccctgtgaggattatttcagtcacacctgtaaagaatattgacccagtaaagaataaggaaattaattctgatcaggctacccagggcaacatcagcagtgaccgaggaaagaaaagaacagtaacagcagctggtgcagagaatatccaacaaaaaacagatgagaaagtagatgaatcgggacctcccgccccttccaaacccaggagaggacgtcgacccaagtctgaatctcagggcaatgctaccaaaaatgatgatctaaataaacctattaacaagggaaggaagagagctgcagtgggtcaggagagccctgggggtttggaagcaggtaatgccaaagcacccaaactgcaagatttagccaaaaaggcagcaccagcagaaagacaaattgacttacaaaggtaaaaatgcatttgcaaagggagaaaatgaaggccaaacagaagcaggctccagcttctgcaaaaacttggattcacaaatgtccctgaacagaaaatgaagctcacttcagaacacacactctctgccttgaaaactaaagagactattacttccttttcacatgaccacaagtcctctgatggaaatgtacagcagaaactcttgagagagaggctaaaagcaactctgttctcccccttcccctagacttttcttacgaaaagtcaataattaagcaaattgcttaacacttggttccagttcctgcctatctggagtttaaatgcgtaatacaccattaatttccacgctgcagtttttattttaaagaaagtaacaagatgtctttacactgacactgaaaattcatccattttagagccaggaattcccatgttacacaggaaaaaatagaagtctactgaattaattttttaaaagaaaagagatcagattaaatatttctttgtttttccttttggaaacttttatgtataattctttctgcctgcctacttttctgcaaaaatgagatgtacagatttcggttccctgctatgaaaagtgatgtggtagcaattttataaatgttgctttctgatttttatcagagtgagaaaattaaaattattgatttgcaagtagtaaacagttcatattttgatttcccctcattttagtttaatataatttgcaataaatgtacatattgttgtttgtttcataaagcatatcactttaaaatggtttttactcctgtgattatgttggaatatttggaattttaaaggagtaaagactgtccagcatttggttttataatgtttgtcaccagatttttattaatgtaaaaaaaatcaatttttaaaaaatagttggactttggcagcttttaaggaaagttggaggtgttttaggattgctatcaattttcagcattgtgctatttggaaataagtgttttgcttttgtctgatggtctgggctcatttttatgtttattttagaaaactgttgcatcaatatattatgtttcttggcattgttcagcataggtaatgtgtgcactttatgtgtacacataatcatatttaagttttttgcataaaataaatgcttctagatgtcatggcagtctttttaatctttttatcatatgctttcttgtgaattttttcatgttaaagagctaaagtcataacatgattacagtcaactctccattatctatataaaatagtgactaagcctcaggtttttaattttgtgataacaaaataacgaaggcatgtaagacctgattctggaggaacatgaaatttgtcttttctcatgtccagagttctatcctgcccccactgtccactgtagggtcatccgcaaagccctagcagaatgtgctcactccatttccttacacgtttctagcatgggtcagaggaaacaacatttgtgttataacttcgtcttgataggctgtagtgtacatgggatgtaaaacaaacaagtgtatcaaaggtggatgattctgttagagtgaagtttgagagtaaatgtcacttacgtttctcatagataatcaagagttggctgtgtattgactgaaagatgggtaattattttaaatatgcatttacacacatttaggtatcagaagatgcttagggaacaatggataccaatgatagaaaatgatacctttacaggggcagaaaaatccccactcttccttattgcctcttcagaaccctttagaaagtataaaatattgcctccaacatgctgaaaaagagtatctatgcataagtatcagagaagtccctcaagcaatcagtaggtgtgttctatttagagagagtttaaagttctcttagcatcagacaacttgattcctaaggtttccagtgtgtcaccaacaaaaagtgcattgatagggacctttgtctcttcctccctttgattaattgcccggcatcacagtttactagattaccaagtgttacatcatattaaataaaatgtagcagaaccatctgcatcaatatattcctgtttagatttttgcaggagagaagttaaaaggatttgctccttgtatgatgtaagtggcccaccccaattttgtaacatgatgcaagtgtctggcactaagggaagcaagagtagggttgtggaaagaccaagctgatggggagggacttgtttacgggaatttttttagttttccttttcaaaggaaaacattaaaatcccttaggaatttggtattcacatctcagagaactacaacacaaaagtgcagacttatatttgagaattaatgttaaccctttgtgtctagtttgaagcttcttgtatttgtctaaaacaacaagccagaattttgtatctcctttgataaaaagtgtgtataatgtaaagtagttttgcatattcttgtgctgcacatgggctgaatttttaaattttttttaaaaacttgaagcagaaccttgtaatttgtgtaaatgacaagtgtaaaatcctaccataaaatgctaaaaatatgcactgtttcaaataaaaccaagaaatgcagcatt

SEQ ID NO: 40 - protein, 1337 aa, Homo sapiens
MDFTAQPKPATALCGVVSADGKIAYPPGVKEITDKITTDEMIKRLKMVVKTFMDMDQDSEDEKQQYLPLALHLASEFFLRNPNKDVRLLVACCLADIFRIYAPEAPYTSHDKLKDIFLFITRQLKGLEDTKSPQFNRYFYLLENLAWVKSYNICFELEDCNEIFIQLFRTLFSVINNSHNKKVQMHMLDLMSSIIMEGDGVTQELLDSILINLIPAHKNLNKQSFDLAKVLLKRTVQTIEACIANFFNQVLVLGRSSVSDLSEHVFDLIQELFAIDPHLLLSVMPQLEFKLKSNDGEERLAVVRLLAKLFGSKDSDLATQNRPLWQCFLGRFNDIHVPVRLESVKFASHCLMNHPDLAKDLTEYLKVRSHDPEEAIRHDVIVTIITAAKRDLALVNDQLLGFVRERTLDKRWRVRKEAMMGLAQLYKKYCLHGEAGKEAAEKVSWIKDKLLHIYYQNSIDDKLLVEKIFAQYLVPHNLETEERMKCLYYLYASLDPNAVKALNEMWKCQNMLRSHVRELLDLHKQPTSEANCSAMFGKLMTIAKNLPDPGKAQDFVKKFNQVLGDDEKLRSQLELLISPTCSCKQADICVREIARKLANPKQPTNPFLEMVKFLLERIAPVHIDSEAISALVKLMNKSIEGTADDEEEGVSPDTAIRSGLELLKVLSFTHPTSFHSAETYESLLQCLRMEDDKVAEAAIQIFRNTGHKIETDLPQIRSTLIPILHQKAKRGTPHQAKQAVHCIHAIFTNKEVQLAQIFEPLSRSLNADVPEQLITPLVSLGHISMLAPDQFASPMKSVVANFIVKDLLMNDRSTGEKNGKLWSPDEEVSPEVLAKVQAIKLLVRWLLGMKNNQSKSANSTLRLLSAMLVSEGDLTEQKRISKSDMSRLRLAAGSAIMKLAQEPCYHEIITPEQFQLCALVINDECYQVRQIFAQKLHKALVKLLLPLEYMAIFALCAKDPVKERRAHARQCLLKNISIRREYIKQNPMATEKLLSLLPEYVVPYMIHLLAHDPDFTRSQDVDQLRDIKECLWFMLEVLMTKNENNSHAFMKKMAENIKLTRDAQSPDESKTNEKLYTVCDVALCVINSKSALCNADSPKDPVLPMKFFTQPEKDFCNDKSYISEETRVLLLTGKPKPAGVLGAVNKPLSATGRKPYVRSTGTETGSNINVNSELNPSTGNRSREQSSEAAETGVSENEENPVRIISVTPVKNIDPVKNKEINSDQATQGNISSDRGKKRTVTAAGAENIQQKTDEKVDESGPPAPSKPRRGRRPKSESQGNATKNDDLNKPINKGRKRAAVGQESPGGLEAGNAKAPKLQDLAKKAAPAERQIDLQR

SEQ ID NO: 41 - DNA, 4824 bp, Homo sapiens
  CDS (27)..(3566)
ggcacgaggctcgccgcggactcaagatggcggcgtgtggacgtgtacggaggatgttccgcttgtcggcggcgctgcatctgctgctgctattcgcggccggggccgagaaactccccggccagggcgtccacagccagggccagggtcccggggccaactttgtgtccttcgtagggcaggccggaggcggcggcccggcgggtcagcagctgccccagctgcctcagtcatcgcagcttcagcagcaacagcagcagcagcaacagcaacagcagcctcagccgccgcagccgcctttcccggcgggtgggcctccggcccggcggggaggagcgggggctggtgggggctggaagctggcggaggaagagtcctgcagggaggacgtgacccgcgtgtgccctaagcacacctggagcaacaacctggcggtgctcgagtgcctgcaggatgtgagggagcctgaaaatgaaatttcttcagactgcaatcatttgttgtggaattataagctgaacctaactacagatcccaaatttgaatctgtggccagagaggtttgcaaatctactataacagagattaaagaatgtgctgatgaaccggttggaaaaggttacatggtttcctgcttagtggatcaccgaggcaacatcactgagtatcagtgtcaccagtacattaccaagatgacgggcatcatttttagtgattaccgtttaatctgtggcttcatggatgactgcaaaaatgacatcaacattctgaaatgtggcagtattcggcttggagaaaaggatgcacattcacaaggtgaggtggtatcatgcttggagaaaggcctggtgaaagaagcagaagaaagagaacccaagattcaagtttctgaactctgcaagaaagccattctccgggtggctgagctgtcatcggatgactttcacttagaccggcatttatattttgcttgccgagatgatcgggagcgtttttgtgaaaatacacaagctggtgagggcagagtgtataagtgcctctttaaccataaatttgaagaatccatgagtgaaaagtgtcgagaagcacttacaacccgccaaaagctgattgcccaggattataaagtcagttattcattggccaaatcctgtaaaagtgacttgaagaaataccggtgcaatgtggaaaaccttccgcgatcgcgtgaagccaggctctcctacttgttaatgtgcctggagtcagctgtacacagagggcgacaagtcagcagtgagtgccagggggagatgctggattaccgacgcatgttgatggaagacttttctctgagccctgagatcatcctaagctgtcggggggagattgaacaccattgttccggattacatcgaaaagggcggaccctacactgtctgatgaaagtagttcgaggggagaaggggaaccttggaatgaactgccagcaggcgcttcaaacactgattcaggagactgaccctggtgcagattaccgcattgatcgagctttgaatgaagcttgtgaatctgtaatccagacagcctgcaaacatataagatctggagacccaatgatcttgtcgtgcctgatggaacatttatacacagagaagatggtagaagactgtgaacaccgtctcttagagctgcagtatttcatctcccgggattggaagctggaccctgtcctgtaccgcaagtgccagggagacgcttctcgtctttgccacacccacggttggaatgagaccagtgaatttatgcctcagggagctgtgttctcttgtttatacagacacgcctaccgcactgaggaacagggaaggaggctctcacgggagtgccgagctgaagtccaaaggatcctacaccagcgtgccatggatgtcaagctggatcctgccctccaggataagtgcctgattgatctgggaaaatggtgcagtgagaaaacagagactggacaggagctggagtgccttcaggaccatctggatgacttggtggtggagtgtagagatatagttggcaacctcactgagttagaatcagaggatattcaaatagaagccttgctgatgagagcctgtgagcccataattcagaacttctgccacgatgtggcagataaccagatagactctggggacctgatggagtgtctgatacagaacaaacaccagaaggacatgaacgagaagtgtgccatcggagttacccacttccagctggtgcagatgaaggattttcggttttcttacaagtttaaaatggcctgcaaggaggacgtgttgaagctttgcccaaacataaaaaagaaggtggacgtggtgatctgcctgagcacgaccgtgcgcaatgacactctgcaggaagccaaggagcacagggtgtccctgaagtgccgcaggcagctccgtgtggaggagctggagatgacggaggacatccgcttggagccagatctatacgaagcctgcaagagtgacatcaaaaacttctgttccgctgtgcaatatggcaacgctcagattatcgaatgtctgaaagaaaacaagaagcagctaagcacccgctgccaccaaaaagtatttaagctgcaggagacagagatgatggacccagagctagactacaccctcatgagggtctgcaagcagatgataaagaggttctgtccggaagcagattctaaaaccatgttgcagtgcttgaagcaaaataaaaacagtgaattgatggatcccaaatgcaaacagatgataaccaagcgccagatcacccagaacacagattaccgcttaaaccccatgttaagaaaagcctgtaaagctgacattcctaaattctgtcacggtatcctgactaaggccaaggatgattcagaattagaaggacaagtcatctcttgcctgaagctgagatatgctgaccagcgcctgtcttcagactgtgaagaccagatccgaatcattatccaggagtccgccctggactaccgcctggatcctcagctccagctgcactgctcagacgagatctccagtctatgtgctgaagaagcagcagcccaagagcagacaggtcaggtggaggagtgcctcaaggtcaacctgctcaagatcaaaacagaattgtgtaaaaaggaagtgctaaacatgctgaaggaaagcaaagcagacatctttgttgacccggtacttcatactgcttgtgccctggacattaaacaccactgcgcagccatcacccctggccgcgggcgtcaaatgtcctgtctcatggaagcactggaggataagcgggtgaggttacagcccgagtgcaaaaagcgcctcaatgaccggattgagatgtggagttacgcagcaaaggtggccccagcagatggcttctctgatcttgccatgcaagtaatgacgtctccatctaagaactacattctctctgtgatcagtgggagcatctgtatattgttcctgattggcctgatgtgtggacggatcaccaagcgagtgacacgagagctcaaggacaggtagagccaccttgaccaccaaaggaactacctatccagtgcccagtttgtacagccctcttgtatagcatccccactcacctcgctcttctcagaagtgacaccaaccccgtgttagagcattagcagatgtccactgcgttgtcccatccagcctccactcgtgtccatggtgtcctcctcctcctcaccgtgcagcagcagcagctggtcgctggggttactgcctttgtttggcaaacttgggtttacctgcctgtagacaagtctctctcataccaacagaacttccggtacttccagaaccaactcacctgacctgcaactcaaaggcttttttaagaaaaccaccaaaaaaaaaaatttttttaaagaaaaaaatgtatatagtaacgcatctcctccaggcttgatttgggcaatggggttatgtctttcatatgactgtgtaaaacaaagacaggacttggaggggaagcacaccacccagtgtgccatgactgaggtgtctcgttcatctctcagaagcaccttggggcctcgccagggccgtggtcttcaccgaggcgtgggtgggcagccgttccccaggctgtgtggggtcctgctttcttctgctgagacagtgacgctttccagtttccaccctaatcagccactgctggtcacagccccacagccatgggtatttctgtggtctcctcgcttcattgaagcaaagcatgagccttcctagacaagggcagctggggaggggaagggaccggaagtttgtgaagttgaacagtccatccatctgcactgagaggctggatcctgagtcccggggcagcaggatcccaggaaccttcctcctccagggcagcacaggactcagccatgtctggaccggccctgctgaggctacagtcactctggaagctctgcgcttcatcaggaggcaggactgtggcgggaggggtccttgaagatgggtgtggggagcagtgggtcaggaagtgggagccagaggtttgactcactttgctttatttttcaggctacaatacaggtcagagacaatggcttataaaggtttagtgtggtctcaggatgtgacaggcagtccagcctgacctttctgcacactccagacaaacttcccagacaagctcctttgtgcctctacgtggagagggtgtggaaagttatcacattaaaagatggaggatttgctctgttaaaaaaaaaaaaaaaaaaaaaaaaaaaaaaaaaaaaaaaaa

SEQ ID NO: 42 - protein, 1179 aa, Homo sapiens
MAACGRVRRMFRLSAALHLLLLFAAGAEKLPGQGVHSQGQGPGANFVSFVGQAGGGGPAGQQLPQLPQSSQLQQQQQQQQQQQQPQPPQPPFPAGGPPARRGGAGAGGGWKLAEEESCREDVTRVCPKHTWSNNLAVLECLQDVREPENEISSDCNHLLWNYKLNLTTDPKFESVAREVCKSTITEIKECADEPVGKGYMVSCLVDHRGNITEYQCHQYITKMTGIIFSDYRLICGFMDDCKNDINILKCGSIRLGEKDAHSQGEVVSCLEKGLVKEAEEREPKIQVSELCKKAILRVAELSSDDFHLDRHLYFACRDDRERFCENTQAGEGRVYKCLFNHKFEESMSEKCREALTTRQKLIAQDYKVSYSLAKSCKSDLKKYRCNVENLPRSREARLSYLLMCLESAVHRGRQVSSECQGEMLDYRRMLMEDFSLSPEIILSCRGEIEHHCSGLHRKGRTLHCLMKVVRGEKGNLGMNCQQALQTLIQETDPGADYRIDRALNEACESVIQTACKHIRSGDPMILSCLMEHLYTEKMVEDCEHRLLELQYFISRDWKLDPVLYRKCQGDASRLCHTHGWNETSEFMPQGAVFSCLYRHAYRTEEQGRRLSRECRAEVQRILHQRAMDVKLDPALQDKCLIDLGKWCSEKTETGQELECLQDHLDDLVVECRDIVGNLTELESEDIQIEALLMRACEPIIQNFCHDVADNQIDSGDLMECLIQNKHQKDMNEKCAIGVTHFQLVQMKDFRFSYKFKMACKEDVLKLCPNIKKKVDVVICLSTTVRNDTLQEAKEHRVSLKCRRQLRVEELEMTEDIRLEPDLYEACKSDIKNFCSAVQYGNAQIIECLKENKKQLSTRCHQKVFKLQETEMMDPELDYTLMRVCKQMIKRFCPEADSKTMLQCLKQNKNSELMDPKCKQMITKRQITQNTDYRLNPMLRKACKADIPKFCHGILTKAKDDSELEGQVISCLKLRYADQRLSSDCEDQIRIIIQESALDYRLDPQLQLHCSDEISSLCAEEAAAQEQTGQVEECLKVNLLKIKTELCKKEVLNMLKESKADIFVDPVLHTACALDIKHHCAAITPGRGRQMSCLMEALEDKRVRLQPECKKRLNDRIEMWSYAAKVAPADGFSDLAMQVMTSPSKNYILSVISGSICILFLIGLMCGRITKRVTRELKDR

SEQ ID NO: 43 - DNA, 1760 bp, Homo sapiens
  CDS (14)..(1645)
ccttccggtcaccatggcgaccaggcgccttggggtcggggagacgctgggggccctcaacgcggccctggggccaggcggtccggtgtggatcaaggagacgcgcacccgccacctgcgttcccgagactttctggcaccgcaccgcgcgctgcaggcgcgcttcgatgacggccaggttccggagcatttgctccatgccctcgcctgcctgcagggccccggtgtggccccggtgctgcgctgcgcgccgacccccgcgggtctgtctctccaactgcagcggtccgccgtcttcgagcgcgtcctcagcgccgtggccgcctatgccacgcccgcctcgcctgcctcgctgggccagcgcgtcttactacactgcccagcactgcgcagctccccctgcgcactccgcttgagccagctgcgtacggtgctcgtggccgatcacctggcgcgagccctgcgcgctcacggggtgtgcgtgcgcctagtgccagctgtgcgggatccgcacatgctgaccttcctgcagcaactgcgggtggactggcccgctgcctcggagagagcttcctcccacaccctgaggagccacgcccttgaagaacttacctctgctaatgacgggaggacactgtcccctggcatcctaggcagactgtgtctgaaggagctggtggaagaacagggccgcacagctggctatgaccccaacctggacaactgtctggtgactgaggatctcctctctgtgctggctgagctgcaagaggctctatggcattggcccgaggacagccacccaggcctggctggggcctcagatactggtacaggcggctgcctggttgtacatgttgttagctgtgaggaggagttccagcaacagaagttggacctgctttggcggaagttggttgacaaggctccactcagacagaagcacctcatctgtggccctgtgaaagtagctggtgcacctggcactctgatgactgcccctgagtactacgagttccggcatacccaggtgtgcaaggcctcagcactgaagcatggtggggatctggcacaagacccagcctggacagagatctttggtgttctctctgtggccaccatcaagtttgagatgctgagcacagccccacagagtcagctcttcctggctctggctgacagcagtatctccacgaagggcacaaagagtggcacctttgtcatgtataattgtgcccgtcttgccacactctttgagagttacaagtgtagtatggaacaaggtctgtaccccacttttcctcctgtgagcagtctggacttctcactgctacatgatgagggtgagtggttgttgctcttcaacagtatcctcccctttccggatctgctgagccggacagcagtgctggactgcacagccccggggctccacattgctgtacgcacagagatgatatgcaagttcctggtacagctcagcatggatttcagctcctactacaaccgggtacacatcctgggggagcctcgaccacacctctttggtcagatgttcgtccgcctgcagcttctgagagctgtgcgtgaggtgctccatactggcctggctatgctgggtctccctccactgagccacatttaaggccacagaggctccaatacctgggaatgttcacaaagtcatcaactggaaaaaaagcaaaaacccacggccaaaataaattggtactgtttgttacaaaaaaaaaaaaaaaaaa

SEQ ID NO: 44 - protein, 543 aa, Homo sapiens
MATRRLGVGETLGALNAALGPGGPVWIKETRTRHLRSRDFLAPHRALQARFDDGQVPEHLLHALACLQGPGVAPVLRCAPTPAGLSLQLQRSAVFERVLSAVAAYATPASPASLGQRVLLHCPALRSSPCALRLSQLRTVLVADHLARALRAHGVCVRLVPAVRDPHMLTFLQQLRVDWPAASERASSHTLRSHALEELTSANDGRTLSPGILGRLCLKELVEEQGRTAGYDPNLDNCLVTEDLLSVLAELQEALWHWPEDSHPGLAGASDTGTGGCLVVHVVSCEEEFQQQKLDLLWRKLVDKAPLRQKHLICGPVKVAGAPGTLMTAPEYYEFRHTQVCKASALKHGGDLAQDPAWTEIFGVLSVATIKFEMLSTAPQSQLFLALADSSISTKGTKSGTFVMYNCARLATLFESYKCSMEQGLYPTFPPVSSLDFSLLHDEGEWLLLFNSILPFPDLLSRTAVLDCTAPGLHIAVRTEMICKFLVQLSMDFSSYYNRVHILGEPRPHLFGQMFVRLQLLRAVREVLHTGLAMLGLPPLSHI

SEQ ID NO: 45 - DNA, 1734 bp, Homo sapiens
  CDS (14)..(1564)
  misc_feature (1547)..(1549): Xaa=phenylalanine or serine
ccttccggtcaccatggcgaccaggcgccttggggtcggggagacgctgggggccctcaacgcggccctggggccaggcggtccggtgtggatcaaggagacgcgcacccgccacctgcgttcccgagactttctggcaccgcaccgcgcgctgcaggcgcgcttcgatgacggccaggttccggagcatttgctccatgccctcgcctgcctgcagggccccggtgtggccccggtgctgcgctgcgcgccgacccccgcgggtctgtctctccaactgcagcggtccgccgtcttcgagcgcgtcctcagcgccgtggccgcctatgccacgcccgcctcgcctgcctcgctgggccagcgcgtcttactacactgcccagcactgcgcagctccccctgcgcactccgcttgagccagctgcgtacggtgctcgtggccgatcacctggcgcgagccctgcgcgctcacggggtgtgcgtgcgcctagtgccagctgtgcgggatccgcacatgctgaccttcctgcagcaactgcgggtggactggcccgctgcctcggagagagcttcctcccacaccctgaggagccacgcccttgaagaacttacctctgctaatgacgggaggacactgtcccctggcatcctaggcagactgtgtctgaaggagctggtggaagaacagggccgcacagctggctatgaccccaacctggacaactgtctggtgactgaggatctcctctctgtgctggctgagctgcaagaggctctatggcattggcccgaggacagccacccaggcctggctggggcctcagatactggtacaggcggctgcctggttgtacatgttgttagctgtgaggaggagttccagcaacagaagttggacctgctttggcggaagttggttgacaaggctccactcagacagaagcacctcatctgtggccctgtgaaagtagctggtgcacctggcactctgatgactgcccctgagtactacgagttccggcatacccaggtgtgcaaggcctcagcactgaagcatggtggggatctggcacaagacccagcctggacagagatctttggtgttctctctgtggccaccatcaagtttgagatgctgagcacagccccacagagtcagctcttcctggctctggctgacagcagtatctccacgaagggcacaaagagtggcacctttgtcatgtataattgtgcccgtcttgccacactctttgagagttacaagtgtagtatggaacaaggtctgtaccccacttttcctcctgtgagcagtctggacttctcactgctacatgatgagtatcctcccctttccggatctgctgagccggacagcagtgctggactgcacagccccggggctccacattgctgtacgcacagagatgatatgcaagttcctggtacagctcagcatggatttcagctcctactacaaccgggtacacatcctgggggagcctcgaccacacctctttggtcagatgttcgtccgcctgcagcttytgagagctgtgcgtgaggtgctccatactggcctggctatgctgggtctccctccactgagccacatttaaggccacagaggctccaatacctgggaatgttcacaaagtcatcaactggaaaaaaagcaaaaacccacggccaaaataaattggtactgtttgttacaaaaaaaaaaaaaaaaaa

SEQ ID NO: 46 - protein, 516 aa, Homo sapiens
  misc_feature (1547)..(1549): Xaa=phenylalanine or serine
MATRRLGVGETLGALNAALGPGGPVWIKETRTRHLRSRDFLAPHRALQARFDDGQVPEHLLHALACLQGPGVAPVLRCAPTPAGLSLQLQRSAVFERVLSAVAAYATPASPASLGQRVLLHCPALRSSPCALRLSQLRTVLVADHLARALRAHGVCVRLVPAVRDPHMLTFLQQLRVDWPAASERASSHTLRSHALEELTSANDGRTLSPGILGRLCLKELVEEQGRTAGYDPNLDNCLVTEDLLSVLAELQEALWHWPEDSHPGLAGASDTGTGGCLVVHVVSCEEEFQQQKLDLLWRKLVDKAPLRQKHLICGPVKVAGAPGTLMTAPEYYEFRHTQVCKASALKHGGDLAQDPAWTEIFGVLSVATIKFEMLSTAPQSQLFLALADSSISTKGTKSGTFVMYNCARLATLFESYKCSMEQGLYPTFPPVSSLDFSLLHDEYPPLSGSAEPDSSAGLHSPGAPHCCTHRDDMQVPGTAQHGFQLLLQPGTHPGGASTTPLWSDVRPPAAXESCA

SEQ ID NO: 47 - DNA, 1745 bp, Homo sapiens
  CDS (14)..(1630)
ccttccggtcaccatggcgaccaggcgccttggggtcggggagacgctgggggccctcaacgcggccctggggccaggcggtccggtgtggatcaaggagacgcgcacccgccacctgcgttcccgagactttctggcaccgcaccgcgcgctgcaggcgcgcttcgatgacggccaggttccggagcatttgctccatgccctcgcctgcctgcagggccccggtgtggccccggtgctgcgctgcgcgccgacccccgcgggtctgtctctccaactgcagcggtccgccgtcttcgagcgcgtcctcagcgccgtggccgcctatgccacgcccgcctcgcctgcctcgctgggccagcgcgtcttactacactgcccagcactgcgcagctccccctgcgcactccgcttgagccagctgcgtacggtgctcgtggccgatcacctggcgcgagccctgcgcgctcacggggtgtgcgtgcgcctagtgccagctgtgcgggatccgcacatgctgaccttcctgcagcaactgcgggtggactggcccgctgcctcggagagagcttcctcccacaccctgaggagccacgcccttgaagaacttacctctgctaatgacgggaggacactgtcccctggcatcctaggcagactgtgtctgaaggagctggtggaagaacagggccgcacagctggctatgaccccaacctggacaactgtctggtgactgaggatctcctctctgtgctggctgagctgcaagaggctctatggcattggcccgaggacagccacccaggcctggctggggcctcagatactggtacaggcggctgcctggttgtacatgttgttagctgtgaggaggagttccagcaacagaagttggacctgctttggcggaagttggttgacaaggctccactcagacagaagcacctcatctgtggccctgtgaaagtagctggtgcacctggcactctgatgactgcccctgagtactacgagttccggcatacccaggtgtgcaaggcctcagcactgaagcatggtggggatctggcacaagacccagcctggacagagatctttggtgttctctctgtggccaccatcaagtttgagatgctgagcacagccccacagagtcagctcttcctggctctggctgacagcagtatctccacgaagggcacaaagagtggcacctttgtcatgtataattgtgcccgtcttgccacactctttgagagttacaagtgtagtatggaacaaggtctgtaccccacttttcctcctgtgagcagtctggacttctcactgctacatgatgagggtgagtggttgttgctcttcaacagtatcctcccctttccggatctgctgagccggacagcagtgctggactgcacagccccggggctccacattgctgtacgcacagagatgatatgcaagttcctggtacagctcagcatggatttcagctcctactacaaccgggagcctcgaccacacctctttggtcagatgttcgtccgcctgcagcttctgagagctgtgcgtgaggtgctccatactggcctggctatgctgggtctccctccactgagccacatttaaggccacagaggctccaatacctgggaatgttcacaaagtcatcaactggaaaaaaagcaaaaacccacggccaaaataaattggtactgtttgttacaaaaaaaaaaaaaaaaaa

SEQ ID NO: 48 - protein, 538 aa, Homo sapiens
MATRRLGVGETLGALNAALGPGGPVWIKETRTRHLRSRDFLAPHRALQARFDDGQVPEHLLHALACLQGPGVAPVLRCAPTPAGLSLQLQRSAVFERVLSAVAAYATPASPASLGQRVLLHCPALRSSPCALRLSQLRTVLVADHLARALRAHGVCVRLVPAVRDPHMLTFLQQLRVDWPAASERASSHTLRSHALEELTSANDGRTLSPGILGRLCLKELVEEQGRTAGYDPNLDNCLVTEDLLSVLAELQEALWHWPEDSHPGLAGASDTGTGGCLVVHVVSCEEEFQQQKLDLLWRKLVDKAPLRQKHLICGPVKVAGAPGTLMTAPEYYEFRHTQVCKASALKHGGDLAQDPAWTEIFGVLSVATIKFEMLSTAPQSQLFLALADSSISTKGTKSGTFVMYNCARLATLFESYKCSMEQGLYPTFPPVSSLDFSLLHDEGEWLLLFNSILPFPDLLSRTAVLDCTAPGLHIAVRTEMICKFLVQLSMDFSSYYNREPRPHLFGQMFVRLQLLRAVREVLHTGLAMLGLPPLSHI

SEQ ID NO: 49 - DNA, 1941 bp, Homo sapiens
  CDS (14)..(1771)
ccttccggtcaccatggcgaccaggcgccttggggtcggggagacgctgggggccctcaacgcggccctggggccaggcggtccggtgtggatcaaggagacgcgcacccgccacctgcgttcccgagactttctggcaccgcaccgcgcgctgcaggcgcgcttcgatgacggccaggtgggcgtgagccgggcggggccgtgcggccgggagatgggccccgtgccgtggctcttttacacgcccgttctcccgcaggttccggagcatttgctccatgccctcgcctgcctgcagggccccggtgtggccccggtgctgcgctgcgcgccgacccccgcgggtctgtctctccaactgcagcggtccgccgtcttcgagcgcgtcctcagcgccgtggccgcctatgccacgcccgcctcgcctgcctcgctgggccagcgcgtcttactacactgcccagcactgcgcagctccccctgcgcactccgcttgagccagctgcgtacggtgctcgtggccgatcacctggcgcgagccctgcgcgctcacggggtgtgcgtgcgcctagtgccagctgtgcgggatccgcacatgctgaccttcctgcagcaactgcgggtggactggcccgctgcctcggagagagcttcctcccacaccctgaggagccacgcccttgaagaacttacctctgctaatgacgggaggacactgtcccctggcatcctaggcagactgtgtctgaaggagctggtggaagaacagggccgcacagctggctatgaccccaacctggacaactgtctggtgactgaggatctcctctctgtgctggctgagctgcaagaggctctatggcattggcccgaggacagccacccaggcctggctggggcctcagatactggtacaggcggctgcctggttgtacatgttgttagctgtgaggaggagttccagcaacagaagttggacctgctttggcggaagttggttgacaaggctccactcagacagaagcacctcatctgtggccctgtgaaagtagctggtgcacctggcactctgatgactgcccctgagtactacgagttccggcatacccaggtgtgcaaggcctcagcactgaagcatggtggggatctggcacaagacccagcctggacagagatctttggtgttctctctgtggccaccatcaagtttgagatgctgagcacagccccacagagtcagctcttcctggctctggctgacagcagtatctccacgaagggcacaaagagtggcacctttgtcatgtataattgtgcccgtcttgccacactctttgagagttacaagtgtagtatggaacaaggtctgtaccccacttttcctcctgtgagcagtctggacttctcactgctacatgatgagggtgagtggttgttgctcttcaacagtatcctcccctttccggatctgctgagccggacagcagtgctggactgcacagccccggggctccacattgctgtacgcacagagatggtgaggcatagacaaccaggacactctacactctattctttattctggcctggggcacaagagcaaagagatgggccagtgactcagtctctgtctctagatatgcaagttcctggtacagctcagcatggatttcagctcctactacaaccgggtacacatcctgggggagcctcgaccacacctctttggtcagatgttcgtccgcctgcagcttctgagagctgtgcgtgaggtgctccatactggcctggctatgctgggtctccctccactgagccacatttaaggccacagaggctccaatacctgggaatgttcacaaagtcatcaactggaaaaaaagcaaaaacccacggccaaaataaattggtactgtttgttacaaaaaaaaaaaaaaaaaa

SEQ ID NO: 50 - protein, 585 aa, Homo sapiens
MATRRLGVGETLGALNAALGPGGPVWIKETRTRHLRSRDFLAPHRALQARFDDGQVGVSRAGPCGREMGPVPWLFYTPVLPQVPEHLLHALACLQGPGVAPVLRCAPTPAGLSLQLQRSAVFERVLSAVAAYATPASPASLGQRVLLHCPALRSSPCALRLSQLRTVLVADHLARALRAHGVCVRLVPAVRDPHMLTFLQQLRVDWPAASERASSHTLRSHALEELTSANDGRTLSPGILGRLCLKELVEEQGRTAGYDPNLDNCLVTEDLLSVLAELQEALWHWPEDSHPGLAGASDTGTGGCLVVHVVSCEEEFQQQKLDLLWRKLVDKAPLRQKHLICGPVKVAGAPGTLMTAPEYYEFRHTQVCKASALKHGGDLAQDPAWTEIFGVLSVATIKFEMLSTAPQSQLFLALADSSISTKGTKSGTFVMYNCARLATLFESYKCSMEQGLYPTFPPVSSLDFSLLHDEGEWLLLFNSILPFPDLLSRTAVLDCTAPGLHIAVRTEMVRHRQPGHSTLYSLFWPGAQEQRDGPVTQSLSLDMQVPGTAQHGFQLLLQPGTHPGGASTTPLWSDVRPPAASESCA

SEQ ID NO: 51 - DNA, 4295 bp, Homo sapiens
  CDS (219)..(1610)
ccttatgggactttcctacttggcagtacatctacgtattagtcatcgctattaccatggtgatgcggttttggcagtacaccaatgggcgtggatagcggtttgactcacggggatttccaagtctccaccccattgacgtcaatgggagtttgttttggcaccaaaatcaacgggactttccaaaatgtcgtaataaccccgccccgttgacgcaaatgggcggtaggcgtgtacggtgggaggtctatataagcagagctcgtttagtgaaccgtcagaattttgtaatacgactcactatagggcggccgcgaattcggcacgagcttaggggtccggggcccgggctgctgctgctggccgtcctgtgcctggggacagcggtgccctccacgggagcctcgaagagcaagaggcaggctcagcaaatggttcagccccagtccccggtggctgtcagtcaaagcaagcccggttgttatgacaatggaaaacactatcagataaatcaacagtgggagcggacctacctaggcaatgcgttggtttgtacttgttatggaggaagccgaggttttaactgcgagagtaaacctgaagctgaagagacttgctttgacaagtacactgggaacacttaccgagtgggtgacacttatgagcgtcctaaagactccatgatctgggactgtacctgcatcggggctgggcgagggagaataagctgtaccatcgcaaaccgctgccatgaagggggtcagtcctacaagattggtgacacctggaggagaccacatgagactggtggttacatgttagagtgtgtgtgtcttggtaatggaaaaggagaatggacctgcaagcccatagctgagaagtgttttgatcatgctgctgggacttcctatgtggtcggagaaacgtgggagaagccctaccaaggctggatgatggtagattgtacttgcctgggagaaggcagcggacgcatcacttgcacttctagaaatagatgcaacgatcaggacacaaggacatcctatagaattggagacacctggagcaagaaggataatcgaggaaacctgctccagtgcatctgcacaggcaacggccgaggagagtggaagtgtgagaggcacacctctgtgcagaccacatcgagcggatctggccccttcaccgatgttcgtgcagctgtttaccaaccgcagcctcacccccagcctcctccctatggccactgtgtcacagacagtggtgtggtctactctgtggggatgcagtggctgaagacacaaggaaataagcaaatgctttgcacgtgcctgggcaacggagtcagctgccaagagacagctgtaacccagacttacggtggcaactcaaatggagagccatgtgtcttaccattcacctacaatggcaggacgttctactcctgcaccacagaagggcgacaggacggacatctttggtgcagcacaacttcgaattatgagcaggaccaggaggaaattccaatggtgccttgtgccacttccccttcctatacaacaaccacaattacactgattgcacttctgagggcagaagagacaacatgaagtggtgtgggaccacacagaactatgatgccgaccagaagtttgggttctgccccatggctgcccacgaggaaatctgcacaaccaatgaaggggtcatgtaccgcattggagatcagtgggataagcagcatgacatgggtcacatgatgaggtgcacgtgtgttgggaatggtcgtggggaatggacatgcattgcctactcgcagcttcgagatcagtgcattgttgatgacatcacttacaatgtgaacgacacattccacaagcgtcatgaagaggggcacatgctgaactgtacatgcttcggtcagggtcggggcaggtggaagtgtgatcccgtcgaccaatgccaggattcagagactgggacgttttatcaaattggagattcatgggagaagtatgtgcatggtgtcagataccagtgctactgctatggccgtggcattggggagtggcattgccaacctttacagacctatccaagctcaagtggtcctgtcgaagtatttatcactgagactccgagtcagcccaactcccaccccatccagtggaatgcaccacagccatctcacatttccaagtacattctcaggtggagacctgtgagtatcccacccagaaaccttggatactgagtctcctaatcttatcaattctgatggtttctttttttcccagcttttgagccaacaactctgattaactattcctatagcatttactatatttgtttagtgaacaaacaatatgtggtcaattaaattgacttgtagactgaggggattttggttttggttttgggttttgtttttttgcggtgggggggctggtatttggaagaatttagctctttatgttacagaaatcttttttgcaaggacttagaaatgataatgcttaagattgttcttgcccaatgtgggaagagaatctaaggtttttatatgtcttgcaacctcatcaaaggaaaattactggcatcattttcataatttgaaaaaaaaagccaaattaatatatttcttttttgattcactttttaagtgatcatttttaaaactttacttttgacccactgaatttatttagatagaaggaaaagagatgatgggagggaagtttagataaaggatggaagttggttttatttaaacaatagccctgtgatttcctaatgagaagtgactagaaattgaagaaaccaaataaggaggatattggtcaatttagctttagtttctcttactctctcaagcctgccctgtttaactccaaagttcatggctcataatttgagaaacactgttttaaacacaggagaaaaaaaatgtccattttaaatcatagctattgaattctacaattacaaagaaacaaacaaacaaaatttgaccaacccaggcggttaaatttaaactcttcaggaaaaatttaagctgttaaaattattctttttctaaatttctaaagtggagggacagaatttttcagatttaaaagggcctcctaggtgcccagaaaattagtggaaagaaccacgtctagacgcatctttgatgtgtcagagttccaaggataaaaagaaacttttaaagtcttctatactcagccaggttatcaatcaaatatgagggcaaaataatattttcagacagattttaggcagtgtatcttccatatatccttttctttaagggtatttgtagatacactccagaaaaacaagagtgaaatatgaaggaagttgtggggtccagcaaacagtgcttccaaatcagacccctgatagaggtggaaaactttgcaatgcaacaactgcgtagctggcttagaggacagccaatacagatggaacagaaagatgaggatgggattgagggatcagggattgaggtctccaagaataaaaagggacttcatggaaaaagtaggcttgtggataattaatcacaggggcaaataatgcagttaaaataacaacatgacaatcaggtggaggaatgtataataaacccaaatgtggctgggtagagtggctcacacctgtaatcccagcactttgggaggccaagccgggcagattacctgaggtcaggagttcgagaccagcttggccaacatggcgaaaccccgtctctactaaaaatacaaaaattagccaggcttgggggcgcacgcctgtagtcccagctcctcaggagctgaggtaggagaatcacttgaacccaggaggcaaagggtgcagggagttgagccaagatcgcgccattgcaccctagcctgggcaacagagcgagattctgtttcaaaaaacccccaagtgtattataaggcaataattcctatacgaagcaaactaaaatgcagcaatattaaggtataaaaacaaagaggaataattccattgaaccttgattctggaaactttgatccacccagcagtcatgatgttagactcattgaaaagaatgtatttctaatgcatgatgcaatcggtctatagatgtgtcatggaaacttggttgcaacttcaagacaaaataaaaagtaaacatttacatgaaaaatggtggatatggaaggtggagaagagaggagataacagctttatctttcaaaatagagaattgagagatggtaccaaaagctgatgaagtaaaaaaaaaaaaaaaaaaa

SEQ ID NO: 52 - protein, 463 aa, Homo sapiens
MGGRRVRWEVYISRARLVNRQNFVIRLTIGRPRIRHELRGPGPGLLLLAVLCLGTAVPSTGASKSKRQAQQMVQPQSPVAVSQSKPGCYDNGKHYQINQQWERTYLGNALVCTCYGGSRGFNCESKPEAEETCFDKYTGNTYRVGDTYERPKDSMIWDCTCIGAGRGRISCTIANRCHEGGQSYKIGDTWRRPHETGGYMLECVCLGNGKGEWTCKPIAEKCFDHAAGTSYVVGETWEKPYQGWMMVDCTCLGEGSGRITCTSRNRCNDQDTRTSYRIGDTWSKKDNRGNLLQCICTGNGRGEWKCERHTSVQTTSSGSGPFTDVRAAVYQPQPHPQPPPYGHCVTDSGVVYSVGMQWLKTQGNKQMLCTCLGNGVSCQETAVTQTYGGNSNGEPCVLPFTYNGRTFYSCTTEGRQDGHLWCSTTSNYEQDQEEIPMVPCATSPSYTTTTITLIALLRAEETT

SEQ ID NO: 53 - DNA, 3113 bp, Homo sapiens
  CDS (524)..(2695)
caccagcgagaaagagggagaggaagacagatagggggcgggggaagaagaaaaagaaaggtaaaaagtcttctaggagaacctttcacatttgcaacaaaagacctaggggctggagagagattcctgggacgcagggctggagtgtctatttcgagctcagcggcagggctcgggcgcgagtcgagaccctgctcgctcctctcgcttctgaaaccgacgttcaggagcggctttttaaaaacgcaaggcacaaggacggtcacccgcgcgactatgtttgctgatttttcgccttgccctctttaaaagcggcctcccattccccaaaagacacttcccctcctccctttgaagtgcattagttgtgatttctgcctccttttcttttttctttcttttttgttttgctttttccccccttttgaattatgtgctgctgttaaacaacaacaaaaaaacaacaaaacacagcagctgcggacttgtccccggctggagcccagcgccccgcctggagtggatgagcctctccatgagagatccggtcattcctgggacaagcatggcctaccatccgttcctacctcaccgggcgccggacttcgccatgagcgcggtgctgggtcaccagccgccgttcttccccgcgctgacgctgcctcccaacggcgcggcggcgctctcgctgccgggcgccctggccaagccgatcatggatcaattggtgggggcggccgagaccggcatcccgttctcctccctggggccccaggcgcatctgaggcctttgaagaccatggagcccgaagaagaggtggaggacgaccccaaggtgcacctggaggctaaagaactttgggatcagtttcacaagcggggcaccgagatggtcattaccaagtcgggaaggcgaatgtttcctccatttaaagtgagatgttctgggctggataaaaaagccaaatacattttattgatggacattatagctgctgatgactgtcgttataaatttcacaattctcggtggatggtggctggtaaggccgaccccgaaatgccaaagaggatgtacattcacccggacagccccgctactggggaacagtggatgtccaaagtcgtcactttccacaaactgaaactcaccaacaacatttcagacaaacatggatttactatattgaactccatgcacaaataccagccccggttccacattgtaagagccaatgacatcttgaaactcccttatagtacatttcggacatacttgttccccgaaactgaattcatcgctgtgactgcataccagaatgataagataacccagttaaaaatagacaacaacccttttgcaaaaggtttccgggacactggaaatggccgaagagaaaaaagaaaacagctcaccctgcagtccatgagggtgtttgatgaaagacacaaaaaggagaatgggacctctgatgagtcctccagtgaacaagcagctttcaactgcttcgcccaggcttcttctccagccgcctccactgtagggacatcgaacctcaaagatttatgtcccagcgagggtgagagcgacgccgaggccgagagcaaagaggagcatggccccgaggcctgcgacgcggccaagatctccaccaccacgtcggaggagccctgccgtgacaagggcagccccgcggtcaaggctcaccttttcgctgctgagcggccccgggacagcgggcggctggacaaagcgtcgcccgactcacgccatagccccgccaccatctcgtccagcactcgcggcctgggcgcggaggagcgcaggagcccggttcgcgagggcacagcgccggccaaggtggaagaggcgcgcgcgctcccgggcaaggaggccttcgcgccgctcacggtgcagacggacgcggccgccgcgcacctggcccagggccccctgcctggcctcggcttcgccccgggcctggcgggccaacagttcttcaacgggcacccgctcttcctgcaccccagccagtttgccatggggggcgccttctccagcatggcggccgctggcatgggtcccctcctggccacggtttctggggcctccaccggtgtctcgggcctggattccacggccatggcctctgccgctgcggcgcagggactgtccggggcgtccgcggccaccctgcccttccacctccagcagcacgtcctggcctctcagggcctggccatgtcccctttcggaagcctgttcccttacccctacacgtacatggccgcagcggcggccgcctcctctgcggcagcctccagctcggtgcaccgccaccccttcctcaatctgaacaccatgcgcccgcggctgcgctacagcccctactccatcccggtgccggtcccggacggcagcagtctgctcaccaccgccctgccctccatggcggcggccgcggggcccctggacggcaaagtcgccgccctggccgccagcccggcctcggtggcagtggactcgggctctgaactcaacagccgctcctccacgctctcctccagctccatgtccttgtcgcccaaactctgcgcggagaaagaggcggccaccagcgaactgcagagcatccagcggttggttagcggcttggaagccaagccggacaggtcccgcagcgcgtccccgtagacccgtcccagacacgtcttttcattccagtccagttcaggctgccgtgcactttgtcggatataaaataaaccacgggcccgccatggcgttagcccttccttttgcagttgcgtctgggaaggggccccggactccctcgagagaatgtgctagagacagcccctgtcttcttggcgtggtttatatgtccgggatctggatcagattctgggggctcagaaacgtcggttgcattgagctactgggggtaggagttccaacatttatgtccagagcaacttccagcaaggctggtctgggtctctgcccaccaggcggggaggtgttcaaagacatctccctcagtgcggatttatatatatatttttccttcactgtgtcaagtggaaacaaaaacaaaaaaaaaaaaaaaaaa

SEQ ID NO: 54 - protein, 723 aa, Homo sapiens
MSLSMRDPVIPGTSMAYHPFLPHRAPDFAMSAVLGHQPPFFPALTLPPNGAAALSLPGALAKPIMDQLVGAAETGIPFSSLGPQAHLRPLKTMEPEEEVEDDPKVHLEAKELWDQFHKRGTEMVITKSGRRMFPPFKVRCSGLDKKAKYILLMDIIAADDCRYKFHNSRWMVAGKADPEMPKRMYIHPDSPATGEQWMSKVVTFHKLKLTNNISDKHGFTILNSMHKYQPRFHIVRANDILKLPYSTFRTYLFPETEFIAVTAYQNDKITQLKIDNNPFAKGFRDTGNGRREKRKQLTLQSMRVFDERHKKENGTSDESSSEQAAFNCFAQASSPAASTVGTSNLKDLCPSEGESDAEAESKEEHGPEACDAAKISTTTSEEPCRDKGSPAVKAHLFAAERPRDSGRLDKASPDSRHSPATISSSTRGLGAEERRSPVREGTAPAKVEEARALPGKEAFAPLTVQTDAAAAHLAQGPLPGLGFAPGLAGQQFFNGHPLFLHPSQFAMGGAFSSMAAAGMGPLLATVSGASTGVSGLDSTAMASAAAAQGLSGASAATLPFHLQQHVLASQGLAMSPFGSLFPYPYTYMAAAAAASSAAASSSVHRHPFLNLNTMRPRLRYSPYSIPVPVPDGSSLLTTALPSMAAAAGPLDGKVAALAASPASVAVDSGSELNSRSSTLSSSSMSLSPKLCAEKEAATSELQSIQRLVSGLEAKPDRSRSASP

SEQ ID NO: 55 - DNA, 2727 bp, Homo sapiens
  CDS (197)..(535)
cgggccggcctggtgctgcacgcctgtcagccatcgcccgagccgccggcgtctcctcccgcccagcagttcctccacgcaggggctccggaatcgcccgaccgcacacgttgccaccctgaggtctttttggaagtggatatctactcagacagtaagaattataagagctgtaagagctcattttggaggaataatggatgaaccatctcccttggcccaacctctggagctgaaccagcactctcgattcataataggttctgtgtctgaagataactcagaggatgagatcagcaacctggtgaagttggacctactggaggagaaggagggctccttgtcacctgcttctgttggctcagatacactctctgatttggggatctctagcctacaggatggcttggccttgcacataagttcttggattaaaaggtctggatcagtggttcttggttctcactgttcatcagaatcacctcggggagccttgggagataagccccatccccagagatttcgattcatttgatactggcttggtgtggaactggggcttttttttaagggacagagtcttaccatgttgcccaggctggtttcgaactcctggcctcaagtgaccttcttgccttggcctcccaaatctctggaattacaggctccaaagatctgcctttccccttccactctgtgaggacacaatgagaatcatgcaagcgagtaggacctggaggcagggaacccaagaactttctagaactaaatcaaatggaaacaagcacttcagttatgacaggaagcatcctcttcctttacataggatatacactgaataaatgactttgtaacttcatcatctttatttacacagggtgtataccaagtaacaatggaaatctctagagggtatttaaaccccagaaaattctgtaaccagacccttgagtggctggcttgcttgggccagctcccaacctgtagagtgtgctttcattttcttttttttattttttattttaattttttgattttttgaaatggagtctcgccctttagcccaggctggagtgcagtggtgcgatcttggctcattgaaacctttgcctcccgggttcaagcaattctcatgcctcagcctcccgagtagctgggactataggtgcccaccaccacgcccagctaattttttgtattttttagtagagatggggtttcactgtgttagccaggatggtcttgatctcctgacctcgtgatccacccgcctcagcctcccaatgtgttgggattacaggtgtgagccaccgtgcctggcctaatttttgtatttttagtagagacaacgtttcaacatgttggctaggctggtctcgaactcctgacctcatgttatccccccacatttacctcccaaagtgctggaattacagacatgagccactgtgcctggccgtgtgctttcattttcagttaagtctctgcttttgttgctttattctttccctgctttgtttgtgtgttttgttcaattctttgttcaaaacaccaagaacttgtacagcctccactggtaacatattttggcaagccagccaggaggtaatcccaaagtttggggtttatttttcttgtttgtttttcctgctccatacaggggaatctcagtctctctctctcttttcctttccaacttgggacggttggtgggcagcacctaaacacagaggcaactgcaggtttctggccggggccactctgaaggactcctttctatcttttccagttgtggtccctgatccctacgtgtggcacagcttggggcgagctggcatttgtttcagtgacttaaaccttgttttctcatgctaaattcttcccttcccctactctactggctaaggacaaaagaaacccacccagcctccagttcctatcattacagttcatggctatcactctagtggaacaggaagcatgggaaagtgtggccttatcaaattataaggatgccagaagtccaggccttcatccagggacaaaaggaaacctcatagtaggccattgcctctgaagggaaaacatgctaagcagcaccagtgcccacctaaggtcagagacgtctgacactctgagactggaccccaaagggggacggcccagggatcctccagacctcaacttctccaaaggggacaccctaggcagagttctgaggtctagtattaagccctccttagaattttctctcgcagttgcaatactgtttggcccaatattgtttggaatctggagcttgctgttgaatgggaaagtgggatggagttgcatgtgtcaaactgctgtggaaactgctatatctgaaattttggttcacagccttcattggattatctgttggggcaaacaaaggaaaaccccccaagcttgtattgctatctcatgccttaagattcccagttaaaagcgattgaatcttcgtttgtgtgcgtctatacatgtctagatgtgtttatttgtatgcacacttattgttacatgttgtgtctaccaaattggcttataaataaaagagcacttaaaaattaagtaaataagtctaagcaattttcaagttcacgtgacttaagtataactttactaaacaagctggctttaaaattattagtaaaataaaactagaaatgccttcaaaaaaaaaaaaaaaaaaaaaaaaaaaaaaaa

SEQ ID NO: 56 - protein, 112 aa, Homo sapiens
MDEPSPLAQPLELNQHSRFIIGSVSEDNSEDEISNLVKLDLLEEKEGSLSPASVGSDTLSDLGISSLQDGLALHISSWIKRSGSVVLGSHCSSESPRGALGDKPHPQRFRFI

SEQ ID NO: 57 - DNA, 593 bp, Homo sapiens
  CDS (13)..(369)
gcttggtgcgctatggcgacacccagcctgcggggtcgtctggcgcggtttgggaacccgcggaagcctgtgctgaagcccaataaacctctcattctagctaaccgcgtcggggagcggcgccgggagaagggcgaggcgacttgcatcacggagatgtcggtgatgatggcttgctggaagcagaatgaattccgcgacgatgcgtgcagaaaagagatccagggcttcctcgattgtgccgcgagggctcaggaagcccgaaagatgagatcaatacaggaaaccctgggagagtctgggagtttacttccaaataaattgaataagttgttacagaggtttcctaacaaaccttacctcagctgaaaatggacaagtattttcaatgactgaaatatagcttctgacaactatgcagaggcattttagagacattggcattgccatgccctctttggagggtagaagaggcaaaacacttttttcaccctttggaatcatagtatgggtagaagttatgatttatcttgaaataaaatcctctgaacagaaaaaaaaaaaaaaaaaaaaaaaaaaaaaaaaaaaaaaaa

SEQ ID NO: 58 - protein, 118 aa, Homo sapiens
MATPSLRGRLARFGNPRKPVLKPNKPLILANRVGERRREKGEATCITEMSVMMACWKQNEFRDDACRKEIQGFLDCAARAQEARKMRSIQETLGESGSLLPNKLNKLLQRFPNKPYLS

SEQ ID NO: 59 - DNA, 3860 bp, Homo sapiens
  CDS (45)..(2486)
gaattccctaaagaattagaagtgcgtctcaccaaccagccaagatgaacatggtgaagaggatcatggggcggccgaggcaggaggagtgcagcccacaagacaacgccttaggactgatgcacctccgccggctcttcacggagttgtgccatcctccccggcacatgactcagaaggaacaagaagagaaactgtatatgatgctgccagtgtttaacagggtttttggaaatgctccgccgaatacaatgacagaaaaattttctgatcttctgcagttcacaacacaagtctcacgactaatggtgacagaaattcgaaggagagcatcaaacaaatccacagaaaaacagtgtgccctgctgtcccccaaggatttcaaagccacaacaccttcagaggctgcaagtcgggccatagttcagttcctagagattaatcagagtgaagaagccagtagaggctggatgcttctaacgacaattaatttgttagcttcctctggtcagaaaaccgtggactgcatgacaacaatgtcagtgccttccaccctggttaaatgtttatatctgttttttgaccttccacatgtgcctgaggcagttggaggtgcacagaatgagctacctctagcagaacgtcgaggactactccagaaagtttttgtacagatcttagtgaaactgtgcagttttgtttcccctgcggaggagctggctcagaaagatgatctccagcttctattcagtgcaataacctcttggtgccctccctataacctgccttggagaaagagtgctggagaagtcctcatgaccatatctcgtcatggtcttagtgtcaatgtagtgaagtatattcatgagaaagagtgtttatctacatgtgttcagaatatgcagcaatcagatgacctgtctcccctagaaattgtcgaaatgtttgctgggctttcttgtttcctcaaagattccagcgatgtttcccaaacacttctggatgattttcggatatggcaaggatataattttctttgtgatctcttgcttagattggaacaagcaaaagaggcagaatccaaagatgccttgaaagatctggttaatctgataacttccctaacaacatatggtgtcagtgaactaaaaccagctggtattaccacaggggcaccctttttattgcctggatttgcagtacctcagcctgcaggcaaaggtcacagtgtgagaaacgtccaggcctttgcagttcttcagaatgcatttttaaaagcaaaaaccagcttccttgcccaaatcatccttgatgctatcacaaatatttacatggctgacaatgccaattacttcatcctagagtcacagcacacattgtcacagtttgcagagaagatttctaaactcccagaagtacaaaacaaatactttgagatgctggagtttgttgtttttagcttaaattatataccttgtaaagaacttattagtgtcagtatcctcttaaaatctagctcttcttatcactgtagcattattgcaatgaaaacacttcttaagtttacaagacatgactacatatttaaagacgtgttcagggaggttggccttttggaggtcatggtaaaccttttgcataaatatgctgccctgttgaaggatccaactcaggcactaaatgaacaaggggactcaagaaataatagttcagttgaagaccaaaaacacctggctttattggttatggagaccttgacagtgcttcttcaaggatcaaacacaaatgcaggaatttttcgagaatttggaggtgcaagatgtgcacataatatagtaaagtaccctcaatgccggcagcatgccttgatgactatccaacagctggtgctctccccaaatggggacgatgacatgggcactctcctggggctaatgcattcagccccaccgacggaattgcagttgaagactgatattttaagggccctcctgtcggtccttcgagaaagccatcgttcaagaacagtttttaggaaagttggaggatttgtgtacattacatccttgctcgttgctatggaaagatctttgagctgtccacccaagaatggctgggagaaagtgaaccagaatcaagtgtttgaacttcttcacactgtgttctgcacgttgactgcagcaatgcgctatgagccagccaactctcatttcttcaaaacagagattcagtatgagaagttggcagatgctgttcgatttcttggctgcttctcagacctaagaaaaataagcgccatgaatgtcttcccctcaaatacacagccatttcaaagacttttagaggaagatgtaatctcaatagaatcagtgtcacccacgttacggcactgcagtaaactttttatttatctttacaaagtagccacagattcttttgacaggtatggctctgctctgtcctctgaattaaagggtgtatactaagcatgacttcaacattaagacttgaattatgagttaatccaaaagaatatgaaaacagatgactcttctcctatttgtttgaagtgtatcactttatttttgaatattactcttgctctggtattgttttttttttttttttagcatggaagcctgtgtactatttgtaaattcaggttcaattagttctcattgcagttattggaacagtttctatgaagtttcctttaatgatagtgtttactgttgttttttttctttttagcctcaaaaggtgcatctggacttattgatatgtgttatcaatagaacatcattatgattattcttatttccagacacgtactccatcattctccacatatcatactcctcaaaaaatgatatagttcccaaagagaggtgtcagtgtcttgaaccgtcaagttcaagaggccatcagactcaatatttactcattccttcatgaaataagtacttaacaaaaagctgctgcatgccaagtcactgtgctaggcattgaggattcagctctacacagggctgtcttggtccttgctatcttttagctaaaatgtagacacataaataaacaattacatatagtgtgacacattctacagtgggggaatccagggttctcaggcagattgtaggagagccacttcatctagatcacttattttcagtgcttcaactgtgttttcaatgaagatgtcactttgaaaataatacttctaatttatgccccaagtgttattgcttttaacttaccatagttttactacataaaataaatgaactgccctcatcaatagaccatgtaactacattggatagagcttgtaataggttttgtgtccttttctgtggaatatctgctttgaagtatcaactgagatatttcctgcttcttaacaagatttcttagtcctcagtatttacatttaaaaatccaaacagctttgacaacaattgtaaaaaaaaaaatcattaaacttctgcttttccctatcttgaagtaaaatgcatatgtatagttaatttatcgaaaacacaggacagtgtagtgttctaggaatgagctatataaatttgtgtattcagattcaacctcttttcccttgatttctacttatcctagttagaatacatcatttttagtcactgtcaaaaatagggcttagagcaccctgtttaacagatgtgttaaatgttaacatgaatggaataagcatctgccgtgagcatgcttttctgtttcattcagtgcttgtgttgtagtcttgttccttgttcctgctgaatatggaagatgttccttattaaacttttactggcatttcttgtgaaactaaaaaaaaaaaaaaaaaa

SEQ ID NO: 60 - protein, 813 aa, Homo sapiens
MNMVKRIMGRPRQEECSPQDNALGLMHLRRLFTELCHPPRHMTQKEQEEKLYMMLPVFNRVFGNAPPNTMTEKFSDLLQFTTQVSRLMVTEIRRRASNKSTEKQCALLSPKDFKATTPSEAASRAIVQFLEINQSEEASRGWMLLTTINLLASSGQKTVDCMTTMSVPSTLVKCLYLFFDLPHVPEAVGGAQNELPLAERRGLLQKVFVQILVKLCSFVSPAEELAQKDDLQLLFSAITSWCPPYNLPWRKSAGEVLMTISRHGLSVNVVKYIHEKECLSTCVQNMQQSDDLSPLEIVEMFAGLSCFLKDSSDVSQTLLDDFRIWQGYNFLCDLLLRLEQAKEAESKDALKDLVNLITSLTTYGVSELKPAGITTGAPFLLPGFAVPQPAGKGHSVRNVQAFAVLQNAFLKAKTSFLAQIILDAITNIYMADNANYFILESQHTLSQFAEKISKLPEVQNKYFEMLEFVVFSLNYIPCKELISVSILLKSSSSYHCSIIAMKTLLKFTRHDYIFKDVFREVGLLEVMVNLLHKYAALLKDPTQALNEQGDSRNNSSVEDQKHLALLVMETLTVLLQGSNTNAGIFREFGGARCAHNIVKYPQCRQHALMTIQQLVLSPNGDDDMGTLLGLMHSAPPTELQLKTDILRALLSVLRESHRSRTVFRKVGGFVYITSLLVAMERSLSCPPKNGWEKVNQNQVFELLHTVFCTLTAAMRYEPANSHFFKTEIQYEKLADAVRFLGCFSDLRKISAMNVFPSNTQPFQRLLEEDVISIESVSPTLRHCSKLFIYLYKVATDSFDRYGSALSSELKGVY

SEQ ID NO: 61 - DNA, 10567 bp, Homo sapiens
  CDS (124)..(9279)
ctggatccgctggttccgtaacaacatcccgttggcttccctcaggcggcgggaccagtgcagccgccgcctcccaggatcgtccgccggtcagggcccttgccctccccggcacaggccaccatggccaccaacccacagccgcagccgcctcctccggcgccgccgcctcccccgccgcagccgcagccgcagccaccgccgccgccgccgggccccggggctggccccggcgcgggcggggcgggcggcgcgggtgcgggcgccggggacccgcagctcgtggccatgatcgtgaaccacctcaagagccaggggctcttcgaccagttccgcagagactgcctggccgacgtggacaccaagcctgcgtatcagaatctgagacagcgtgttgacaactttgttgcaaatcacttggcaactcacacatggagtccgcatctcaataagaaccagctaagaaacaacattagacaacaagtcctcaaatcaggaatgttggagtctggtattgaccgaattatttctcaggttgtggacccaaagatcaaccacacattcagacctcaggtagagaaagctgtgcatgagtttttggccacgctaaatcacaaagaggaaggaagtggcaacacagctcccgatgatgagaaaccagacacttcccttattacacaaggtgttcctactcctgggcccagtgctaatgtagccaatgatgccatgtcgatattggaaaccataacttctcttaaccaagaagccagtgctgctagggcttcaacagaaacatcaaatgccaagaccagtgagagagcgtcaaaaaaacttccatctcagccaaccactgatactagtactgacaaagaaagaacttcagaggacatggctgataaagaaaaatctacagctgactctggaggtgaaggactggaaacagccccaaagtctgaagagttcagcgacctcccctgtccagtcgaagaaattaaaaattacacaaaagagcataataatttaattctgctaaataaggatgttcaacaggaaagcagtgagcaaaaaaataaatcaacagacaaaggtgaaaagaagccagacagcaatgagaaaggagaaagaaagaaagaaaagaaggaaaagactgaaaagaaatttgatcactcaaaaaagagtgaagatacacagaaagttaaagatgaaaaacaagcaaaggaaaaagaagtagagagtttaaaacttccttcagaaaagaacagtaataaagctaaaactgttgaagggacaaaagaagatttctctttgatagattctgatgtggatggacttacagacatcacagttagctctgttcataccagtgacctttcatcttttgaagaagatactgaggaggaagttgtaacgtctgatagcatggaagaaggagagattacgtcagatgatgaagagaagaacaaacagaataaaacaaaaactcaaactagtgattctagtgaaggaaaaacaaaaagtgtacggcatgcgtatgtccacaaaccatatctttactcaaaatactatagtgattctgatgatgagcttactgtagaacaacgacgacagtccattgccaaagaaaaagaagagaggcttttaagaaggcaaatcaatagagaaaaacttgaagaaaaacgaaaacagaaagcagaaaagacaaagtcttcaaaaaccaagggtcaaggcaggagtagtgtggacttagaagaatcatcaacaaagagtttggaacctaaagccgccagaattaaagaagtccttaaagaacggaaagttttagaaaaaaaagtagccttaagcaaaaagagaaaaaaagattcaaggaatgttgaagagaactccaaaaagaaacagcaatatgaagaagattccaaagaaacccttaaaacaagtgagcattgtgaaaaggaaaaaatttcttcttcaaaggagctgaagcatgttcatgcaaaaagtgaaccaagtaaacctgcccggagactttcagagtctttgcatgtagttgacgaaaacaaaaatgaatccaaaatagaaagagaacataaaagacggacatctacccctgttatcatggagggggtacaggaagagactgacacaagagatgtaaaaaggcaagtagaacgctcagaaatttgcaccgaagagccccagaaacagaaaagcacacttaaaaacgaaaagcatctaaagaaagatgattctgaaacaccacatttgaaaagcctacttaagaaagaggtgaaatcctccaaggagaagcctgaaagagagaaaactccatcggaagacaaattgtctgtgaaacataaatataaaggtgattgtatgcataaaacaggtgatgagactgagcttcactcttctgagaaaggtttaaaagtagaggaaaatattcaaaagcaaagtcaacaaacaaagctttcttcagatgataaaaccgaacgaaaaagtaaacataggaatgaaaggaaattatcagtattaggcaaagatggaaagccagtttctgaatatattataaaaacagatgagaatgttcgtaaagaaaacaacaaaaaagagagacgcttgtcagctgaaaaaactaaggcagagcacaaatcaagaaggtcaagtgattctaaaattcagaaagattctctgggttccaagcaacatggtatcacattacagagaagaagtgaaagttattcggaagataagtgtgatatggactccactaacatggatagtaatttgaaaccagaagaggttgttcacaaggagaaacgacgaacaaagagcttgttagaagagaaacttgtgttgaagtctaaatcaaaaactcaaggcaaacaggtaaaagttgtagaaacagaattacaagaaggtgccacaaaacaggcaaccactccaaaaccagacaaggagaagaacacagaagaaaatgactcagaaaaacagcgtaagtctaaagttgaagacaaaccttttgaagaaactggtgttgaacctgtattagagactgcttcttcttcagcacatagtacacagaaggattctagtcatagagccaagttaccattagcaaaggagaaatataagagtgataaagactccacttccaccaggcttgagagaaagttgtcagatggccacaaaagcagaagcttaaagcatagtagtaaagacataaaaaagaaggacgaaaataaatcagatgacaaggatggtaaagaagttgacagtagtcatgaaaaggccagaggtaatagttcactcatggaaaagaaattaagtagaaggttgtgcgaaaatcggagaggaagcttgtcacaagaaatggccaaaggagaagaaaaattagcagcaaacactttgagcactcccagcggttcctcccttcagagaccaaaaaagagtggtgatatgacattgatccctgaacaagagccaatggaaattgattctgagccaggtgttgaaaatgtgtttgaagtatctaaaacccaagacaaccgcaataataattctcagcaagacattgactctgaaaatatgaaacaaaaaacttctgccactgttcaaaaggatgaattgagaacttgcacagcagattcaaaagcaacagctccagcttataagccaggccgtggaacaggagttaatagtaattctgaaaagcatgccgatcatagaagcaccttgaccaagaaaatgcatatacaaagtgctgtgtccaaaatgaaccctggggagaaagaacccattcatagaggaactactgaagtgaatatagattctgaaactgttcatagaatgttactgagtgccccatcagaaaatgatagggtacagaagaatttgaaaaacacagctgctgaagaacatgttgctcaaggagatgccactcttgaacattccacaaatttagactcctcaccatccttaagttcagtgactgttgtgcctctgagggaatcgtatgatccagatgtaattcctctgtttgacaaaagaactgttttggaaggtagcacagccagcacctcccctgcggatcactctgctctccctaaccaaagtctgactgttagggaatcagaagtccttaagacaagtgacagcaaagaaggtggtgaaggtttcacagtagatacaccagcaaaagcaagcatcactagcaaaagacacattccagaagctcaccaggctactttattggatggtaaacaaggaaaggtaatcatgcctcttggaagtaagttaacgggcgtgattgtggaaaatgagaatattaccaaagaaggtggcttagtggacatggccaagaaagaaaatgacttaaatgcagagcccaatttaaagcagacaattaaagcaacagtagagaatggcaagaaggatggcattgctgttgatcatgttgtaggcctgaatacagaaaaatatgctgaaactgtcaaacttaagcataaaagaagcccaggtaaagtaaaagacatatcaattgatgttgaaagaaggaatgaaaacagtgaggtagacaccagtgctggaagtggctctgcaccctctgttttacaccaaaggaacggacaaactgaggatgtggcaactgggcctaggagagcagaaaagacttctgttgccactagtactgaagggaaggacaaagatgtcaccttaagtccagtgaaggctgggcctgccacaaccacttcttcagaaacaagacaaagtgaggtggctttgccttgcaccagcattgaggcagatgaaggcctcataataggaacacattccagaaataatcctcttcatgttggtgcagaagccagtgaatgcactgtttttgctgcagctgaagaaggtggggctgttgtcacagagggatttgctgaaagtgaaaccttcctcacaagcactaaggaaggggaaagtggggagtgtgctgtggctgaatctgaggacagagcagcagacctactggctgtgcatgcagttaaaatcgaagccaatgtaaatagcgttgtgacagaggaaaaggatgatgctgtaaccagtgcaggctctgaagaaaaatgtgatggttctttaagtagagactcagaaatagttgaaggaactattacttttattagtgaagttgaaagtgatggagcagttacaagtgctggaacagagataagagcaggatctataagcagtgaagaggtggatggctcccagggaaatatgatgagaatgggtcccaaaaaagaaacagagggcactgtgacatgtacaggagcagaaggcagaagtgataactttgtgatctgctcagtaactggagcagggccccgggaggaacgcatggttacaggtgcaggtgttgtcctgggagataatgatgcaccaccaggaacaagtgccagccaagaaggagatggttctgtgaatgatggtacagaaggtgagagtgcagtcaccagcacggggataacagaagatggagaggggccagcaagttgcacaggttcagaagatagcagcgaaggctttgctataagttctgaatcggaagaaaatggagagagtgcaatggacagcacagtggccaaagaaggcactaatgtaccattagttgctgctggtccttgtgatgatgaaggcattgtgactagcacaggcgcaaaagaggaagacgaggaaggggaggatgttgtgactagtactggaagaggaaatgaaattgggcatgcttcaacttgtacagggttaggagaagaaagtgaaggggtcttgatttgtgaaagtgcagaaggggacagtcagattggtactgtggtagagcatgtggaagctgaggctggagctgccatcatgaatgcaaatgaaaataatgttgacagcatgagtggcacagagaaaggaagtaaagacacagatatctgctccagtgcaaaagggattgtagaaagcagtgtgaccagtgcagtctcaggaaaggatgaagtgacaccagttccaggaggttgtgagggtcctatgactagtgctgcatctgatcaaagtgacagtcagctcgaaaaagttgaagataccactatttccactggcctggtcgggggtagttacgatgttcttgtatctggtgaagtcccagaatgtgaagttgctcacacatcaccaagtgaaaaagaagatgaggacatcatcacctctgtagaaaatgaagagtgtgatggtctcatggcaactacagccagtggtgatattaccaaccagaatagcttagcagggggtaaaaatcaaggcaaagttttgattatttccaccagtaccacaaatgattacacccctcaggtaagcgcaattacagatgtggaaggaggtctctcagatgctctgagaactgaagaaaatatggaaggtaccagagtaaccacagaagaatttgaggcccccatgcccagtgcagtctcaggagatgacagccaactcactgccagcagaagtgaagagaaagatgagtgtgccatgatttccacaagcataggggaagaattcgaattgcctatctccagtgcaacaaccatcaagtgtgctgaaagtcttcagccggttgctgcagcagtggaagaaagggctacaggtccagtcttgataagcaccgccgactttgaggggcctatgcccagtgcgcccccagaagctgaaagtcctcttgcctcaaccagcaaggaggagaaggatgaatgtgctctcatttccactagcatagcagaagaatgtgaggcttctgtttccggtgtagttgttgaaagtgaaaatgagcgagctggcacagtcatggaagaaaaagacgggagtggcatcatctctacgagctcggtggaagactgtgagggcccagtgtccagtgctgtccctcaagaggaaggcgacccctcagtcacaccagcggaagagatgggtgacaccgccatgatttccacaagcacctctgaagggtgtgaagcagtcatgattggtgctgtcctccaggatgaagatcggctcaccatcacaagagtagaagacttgagcgatgctgccatcatctccaccagcacagcagaatgtatgccaatttccgccagcattgacagacatgaagagaatcagctgactgcagacaacccagaagggaacggtgacctgtcagccacagaagtgagcaagcacaaggtccccatgcccagcctaattgctgagaataactgtcggtgtcctgggccagtcaggggaggcaaagaaccgggtcccgtgttggcagtgagcaccgaggaggggcacaacgggccatcagtccacaagccctctgcagggcaaggccatccaagtgctgtttgtgcggaaaaagaagagaagcatggcaaggagtgccccgaaataggaccatttgcaggaagaggacagaaagagagcactttacacctcataaatgcagaagagaagaatgtattgttgaactcccttcagaaagaagataagagcccagagacagggacagcagggggcagtagcacagcaagttattcagcaggaaggggcttagaggggaatgctaactcacctgcccacctgagaggaccagaacagacgtctgggcagacggctaaggatccctctgtcagcattcgctatttggcagcagtaaacaccggtgctataaaagctgatgacatgccacctgttcaagggaccgtggctgagcattcctttcttcctgctgagcagcaggggtctgaagacaacttgaaaaccagtaccaccaaatgtattactggccaagaatcaaaaattgctccttcccacacaatgatccctccagctacttacagtgtagctctgttggctcctaaatgtgagcaggacttgactataaagaatgattatagtggcaaatggactgatcaagcatctgctgagaaaacaggagatgataacagcacaaggaaatcattccctgaggaaggagacataatggttactgtgtcttctgaagaaaatgtgtgtgacataggcaatgaagagtctccattgaatgttttgggaggattgaaactgaaagccaacttgaaaatggaggcttatgtgccttcagaggaagagaaaaatggtgaaattctggcaccaccagaaagtctgtgtgggggaaagccaagtggaatagctgaactccagagggagcctttgttggtgaatgaatcactaaatgttgaaaattcaggcttcagaacaaatgaagaaattcatagcgaatcttataacaaaggagagatatccagtggtagaaaagacaacgcagaagccataagcggtcacagtgttgaagcagatcctaaagaggttgaagaggaagaaaggcatatgcctaaaagaaaaagaaagcagcattatctctcttcagaagatgaaccagatgataatccagatgtcctggattccagaatagaaacagcacaaaggcagtgtcctgaaacggagccacatgacacaaaggaagagaactccagagatttggaagaattacctaaaaccagttctgagacaaatagcactacctcaagggtcatggaagaaaaagatgaatatagcagcagtgaaactactggtgaaaagccagagcagaacgatgatgacaccataaaatctcaggaggaagatcagccaataattattaaaaggaaaagaggaagacctcgcaaataccctgtagaaacaacgttaaaaatgaaagacgactccaaaacagatactggcattgtcactgtagaacaatctccatctagcagcaaactgaaagtaatgcaaacagatgaatccaataaagaaacagctaacctacaagaaagaagtataagcaatgatgatggtgaagaaaaaatagtaacaagtgtgcgtcggagaggaagaaaacccaaacgttctctcactgtatcagatgatgctgaatcctcagagccagaaagaaaacgccagaaatcagtttctgatccagtggaggacaagaaagagcaggagtctgatgaggaagaggaagaagaggaagaggacgagccttcaggagccaccacaagatccaccaccagatcagaggctcagagatcaaagacacagctctccccttctatcaagcgcaagagagaagtcagccctcctggggcccgaacaagaggccagcaaagggtggaggaagcccctgtgaaaaaagcgaagcgataatcctgaccactgctgccctaggcttatggaggaacacggtggagaggaaagagacatgccttggtggccataggcttctctttaaccaggaaaaagatatgcatgtgctgtaagtccctaggtgcaagctttttcttgttatgttttaaacagctttataaactattgttcatagaagatattatgtacatttatttcagataaaggacaataagtttactttgtatctgaactcaaaacaaagtagttgtatattttaacattcaaaattgggatttcccaatgtgacacatcatgaatgcaaacccctccagcccatcagacgccaggctgcctactggtaatctgtgtatagtatataaacatgtaaaaataggttgtattttactctatgtatgatgctaatcaatgaacactttatttattttacagagaaaacttatctgtgaactttactatatatctgtttattttactttattttttttttaaataaaaagggttttaaatgctatgcagtcattagtagaaaattttttaggactctgcctgctctgtaactatcttaatatgatctggcagaaactcgcatgtatccaagtaaagtagtttagctaaagaaaggttcttcattgcttttctgttcacagttgtggctctgttttttaagaatgtaacttgtttttagattatacttgcatctgtgactttactaccagccacgttgacacaaaacaggttctggttcaggtaaagttgcgtcagtcacctgcagcagaaatccctcttcattcctcttctctgtgttcattcctcttctgtgctgttctgaagcttctaccaatactctttccatattgtctttttcagtgaagagaaatgcattcaagattaggtccctcctgtctatccagtttcaggattttatgttgttttatacacagttatttcagtatagaaactggctttattgccaagtgtttttttaaacatgttttaactctcatatgagcaaactgtccaacttcagtttttcataagattaaacttcttacgatcaaatttgtctcttgcaatgatgtgatgagttgccaaataattgagattattttaaaatgttttgttcatattcttgttttataattaaaatttacattcagtgtgtatgggtttttttttttattttgactcttaatgtaaggtggatatttctgtcattttacatggtttcttactgagattttatatataaattataaaatgtttaccaaaaaaaaaaaaaaaaaaa

SEQ ID NO: 62 - protein, 3051 aa, Homo sapiens [sequence omitted]

SEQ ID NO: 63 - DNA, 2416 bp, Homo sapiens
  CDS (156)..(950)
ccacgaccaatgatatgaaatacaacgatggtttttcatatcattggtcgtggctgtagtccgtgcgagaataatgatgtatgctttgtttctgttgagtgtgggcgcttgccccgggggtctgtcgcgtcgcaggcgccgccggagccctggccatgaggaccctgtggatggcgctgtgcgcgctgtcgcggctgtggcccggggcccaggccggctgcgccgaggccgggcgctgctgtcccggccgggaccccgcctgcttcgcccgcggctggaggctggacagggtctacgggacgtgtttctgcgaccaagcctgtcgcttcaccggggactgctgcttcgactacgacagggcgtgcccagctcgcccgtgcttcgtgggggaatggagcccctggagtggttgtgcagaccagtgcaagcctacaacccgtgtgcggaggcgctcggtgcagcaggagcctcagaacggcggggcgccctgcccacccctggaagagagagctggctgcctggagtactccaccccgcagggccaggactgcgggcacacctatgttcctgcctttataactacctctgcattcaacaaggagagaacacgacaagctacgtctccacactggtctacacacacagaggatgctggatactgtatggagtttaagacagagtccttgactcctcactgtgctctggaaaactggcccttgactagatggatgcagtatctccgagagggatacacggtgtgtgtggattgtcagcctccagctatgaactctgtgagccttcgttgttctggagatggcctggactccgatggaaatcagactctccattggcaagcaattggtaatcctcggtgtcaaggaacttggaaaaaagttcggcgagtagaccagtgttcttgtccagctgttcacagttttatttttatatagatggtgatataaatatttccaaatgcatttgtaaacattctaaatattctcaagtcatgttcaatgtttcctaaaccttcaattttggccaaagtccccaaacacatcattgccacactctgaagtagagaaagaaaatttaggggccagttctcaaggaacacaggtcctttatttttattttaactaagttgaagacccactcaaaaagctcttgtggttttatgttcttgacctttcaactggagtcctctcattcagcaggtggcccgtgagacacagaatacatgtctgtttgctaaagtaaaattactgtaactcagtccgattattggtgacggaagtgtcatttaaggggatctatgttttgaaccttgcagtctattttataatcttttaaaagtttctcactttaaaacatgtatacaggtatgcacactctacacatatatttccatatatttaatattccataaattctgaaataatttcaagcaaattatcacaaataatttttccacagggcaaattatttaaaattttagtaagcattctgtaatgaaaaaccaagttatactaaaaacattttttgaagaagaaatttttttttttgcttaagaagtgaaaggatcaaatgctcattgtaggtcaatgggagttcttttaaatgttataattttcatgaaaagaaatgttgacaccagtgaatgaaacaattgctttcattctgaaaattctaccaccatttgcatctaagattatttccaaggcttaaagcctgaagctgaataaaataatctttcagagtccagcttcaagtttagttgatgtaagctcactatttttttcctaccgcatgcattttctaatgtttggggtggatggtgtgtcggttatggaaggcatagacgtcattacaggtgctacgatctcacacacacacaaggaaatgttagtctccttattttatgattggaaaatcaatgacctagaggcaaaatggcatgtttaaggacctgggatgacaagtcattctgcagtcagccacagagccaaatttggactcctcaaccagaactccatgaaaagcctgactttgccaaacactgtgctggaaaagctaagcccctttcatttgtgaagtaaattttaaattcaagatatttagtttagagaattgagtcttgagatgtaaactacatgagatttctttggtttcaattgaataatattcactaacaaatgatttactaaaatacgtatttcttggtccttatcatgtaatgacagattcacaacagcaataaggatggagatttccccaataattaataacaccgagagtagcaatattttttactgtattttcatttaattgtcaaagttgtttttgtggaaaattaaattcttcagaaattaaaaaaaaaaaaaaaaaaaaaaaaaaaaaaaaaaaaaaaaaaaaaaaa

SEQ ID NO: 64 - protein, 264 aa, Homo sapiens
MRTLWMALCALSRLWPGAQAGCAEAGRCCPGRDPACFARGWRLDRVYGTCFCDQACRFTGDCCFDYDRACPARPCFVGEWSPWSGCADQCKPTTRVRRRSVQQEPQNGGAPCPPLEERAGCLEYSTPQGQDCGHTYVPAFITTSAFNKERTRQATSPHWSTHTEDAGYCMEFKTESLTPHCALENWPLTRWMQYLREGYTVCVDCQPPAMNSVSLRCSGDGLDSDGNQTLHWQAIGNPRCQGTWKKVRRVDQCSCPAVHSFIFI

SEQ ID NO: 65 - DNA, 4372 bp, Homo sapiens
  CDS (78)..(1922)
cagtcctcgaccccccgcacctcgccccttccccaccccctcctccgcctcggtgcccggcgctgctccggaccactatgaccatgagatccgcggtgttcaaggcggccgcggcccctgccggcggcaatcctgagcagcgactggactacgagcgggctgcggcgctgggcgggcccgaggacgagcctggggcggccgaagcccacttcctcccccggcaccgtaagctcaaggagccggggcccccgctggcctcctcccagggcgggagccccgcgccttccccggccggctgcggcggcaagggccggggcttgttactcccggccggggcggcccccgggcagcaggaagagagctggggcggttcggtgcccttgccctgtccgcccccggccaccaagcaagccggcattgggggggagcctgccgcagccggagccggctgcagcccccggcccaagtatcaggcggtgctgcccattcagacgggctctctcgtggcggcggccaaagagcctacgccctgggctggggacaagggtggggcggcctcccccgctgccaccgcctcggacccggcgggacccccaccactacctctgcccgggccgccacccctcgcgcccaccgccaccgccgggaccctggcggccagcgagggcagatggaagagtatgaggaagagccctctcgggggtggtggcggctcgggagcctccagtcaggccgcctgcctcaaacagatccttctgctgcaattggacctcatcgaacagcagcagcagcagctgcaggccaaggaaaaggagatcgaggagctgaagtcagagagagacacgctccttgctcggattgaacgtatggaaaggcggatgcagctggtaaagaaggataacgagaaagaaaggcacaagctgtttcagggctatgaaactgaagagagagaggaaacagagctatctgagaaaattaaactggagtgccagccggagctttccgagacatcccagactctgcctcccaagcccttctcatgtgggcggagtggaaagggacataaaaggaaatccccatttggaagtacagaaagaaagactcctgttaaaaagctggctcctgaattttcaaaagtcaaaacaaaaactcctaagcactctcctattaaagaggaaccctgtggttccttatctgaaactgtttgtaaacgtgaattgaggagccaagaaaccccagaaaagccccggtcttcagtggacaccccaccaagactctccactccccaaaagggacccagcacccatcccaaggagaaagccttctcaagtgagatagaagatttgccgtacctttccaccacagaaatgtatttgtgtcgttggcaccagcctcccccatcaccgttaccattacgggaatcctctccaaagaaggaggagactgtagcaaggtgtctgatgccatcaagtgttgcaggagaaacttcagtcttggctgttccttcttggagggaccactcagtagagcctctaagggacccaaatccttcagaccttttggagaacctggatgacagtgtgttttcgaagcggcatgcaaaactggagctggatgagaagagaaggaaaagatgggatattcagaggatcagggaacaaagaattttacagcgactgcagctcagaatgtataaaaagaaaggaattcaggaatctgagcctgaggttacctcatttttccctgagccagatgatgttgaaagtttgatgattacccccttcttgcctgttgtagcatttggacgaccattaccaaaattaactccacagaattttgagctaccctggttggatgagcgtagccgatgcagattggagatccagaagaagcaaacacctcaccggacgtgtaggaaatagctgtgctggcaagaaccctgtcttcagatagttgtagcatgccattcccgagagtggcagagacctgtatatgtgacctttgtcctcacatatgttatcactcgctgataataccctttcatacttccttgactttgttttcattactctgatttcacaaaaactctttcattcggctaattgtgagttatggagggtgattgggatttcttttcccttttttgggaaatgggctctcaagctaaagctataggatggcagattcagaagtttcaggggtctgtttctatacatttgcctatgttaaaggggtaaaagggctctcttcattagacatgtggaagatgaagcagccccttcctttagagctgtgcctgcatggcactcttctcaccctggtacaccctccttatagtgggtatagtgatttttaaccctaaaataaaacaaacaacctcaccatgagctttaggaccagaagaggaatgacaagtgaagcgatgaagcaagccatcttcacagagtagaaaagacatcggagagttggtagataactgtctgaaaagatagttgttcatttgaaactattctgtgatacagtcatgtgggaagggatgtttggctgtgattattttttcagttaatggataacaatttctttactgctcaaaaaccaaaatctttggaaaagaaagtggggatggttagtttcagaacaagttacagctgtaaacaaaagcacttagtatttgggatggcatgccaaaacctgtataaatgtccttgtatcacatcacttctcaagtattccttcattgggcttcatccttttagcagaactcttggtggtgggatagagacttagggagggtagggggagagtgtggaaataggtgcttcctttggctggcaaatgtctacatcttgaaacaaacagatgtacctaatgagcttctccattcactttgtaaaaataatttgtatgtgtaccatcttggtcctctcccctcccgttttgttaaaatatcaggatagcactcccaggccactttggtctcagtgtaagatccctattaactatctgaaaggaaaatagagccaagacctctggtctcaaatatataggaattgcctttctttagtcttcaggactattgtgtgaaaacaagtaggggtctaatctcctagaaggtaggggcttttatccttaaagagaatatgtccccagattattagcacttttagaggagaagccaaggtatgtagggtgtgtggctggcccatcagtggagcacgaagagagaatgggataccattgtgggaagagaagaaaagttcctcaggggcctcccactgctaaagttttttgtgagatgttgatctgtgcttcctggatttgacttttaaaggaattattctggcagcacatgtagtattcttggatgatcttgctgctcttatttctccttttgtgtgtgtgtgtgtgtgtgtgtggctatgggttttcatttgtaactccatctgcttaggagagtgggctctctataagggaacctgctgtaaacttcattgcagcaaggatgtagagagaaataggacttaattccactaggggctctcatctcacaccttaaggaggagatttctagaaaaactgggccagattttctttgttctccatcattttaatgtggcaggctgttcagttttcttactcttacctatgtgatatttcttcgtaacgtgtccaaaaagaaaaaagacccaatcagtgtctcttgactttgttctttgatccctcagtttcttcttgatttcagcatgtgtcgggttcctaattttgggtatgagttagcaaatttaaccattgtgtttgtgccctacccaggggactccccagtttctgacttgaagtagactgagaagaatccacgaggtgctatctggccagatttaagtagattctatttccttggttctccctctccctgaggacctcttattttattgtcccctcttctaggttaattctcctttgatttgactttgttgagaaggaggttggacagtagattagcaaagttccaagtgcaaaattacagtgtgttagagtgtggggggaaaattagtcttatttttccctacatgggatacaacactgtgaattcaatcttcaactgaaggccctgcagttctcctaaaacatagttgtttgtttttctttaacaaagtttaagctagtgttaataaattaaaaaaaattgcttgtctgtctacttcagctttgttttatgcccatttcatattgttgtctgtgttgtaattcataacttttgataccatttctgatgtgtaaaattggttgtcttgtaaatatcttataaagagttcaattgtaaataaactattgtggctgttaaaaaaaaaaaaaaaaaaaaaaaaaaaaaaaa

SEQ ID NO: 66 - protein, 614 aa, Homo sapiens
MTMRSAVFKAAAAPAGGNPEQRLDYERAAALGGPEDEPGAAEAHFLPRHRKLKEPGPPLASSQGGSPAPSPAGCGGKGRGLLLPAGAAPGQQEESWGGSVPLPCPPPATKQAGIGGEPAAAGAGCSPRPKYQAVLPIQTGSLVAAAKEPTPWAGDKGGAASPAATASDPAGPPPLPLPGPPPLAPTATAGTLAASEGRWKSMRKSPLGGGGGSGASSQAACLKQILLLQLDLIEQQQQQLQAKEKEIEELKSERDTLLARIERMERRMQLVKKDNEKERHKLFQGYETEEREETELSEKIKLECQPELSETSQTLPPKPFSCGRSGKGHKRKSPFGSTERKTPVKKLAPEFSKVKTKTPKHSPIKEEPCGSLSETVCKRELRSQETPEKPRSSVDTPPRLSTPQKGPSTHPKEKAFSSEIEDLPYLSTTEMYLCRWHQPPPSPLPLRESSPKKEETVARCLMPSSVAGETSVLAVPSWRDHSVEPLRDPNPSDLLENLDDSVFSKRHAKLELDEKRRKRWDIQRIREQRILQRLQLRMYKKKGIQESEPEVTSFFPEPDDVESLMITPFLPVVAFGRPLPKLTPQNFELPWLDERSRCRLEIQKKQTPHRTCRK

SEQ ID NO: 67 - DNA, 2179 bp, Homo sapiens
  CDS (169)..(1917)
caagctctaatacgactcactatagggaaagctggtacgcctgcaggtaccggtccggaattcccgggtcgacccacgcgtccggccgagagaagcagtagtcaataaagagagtgccgtatttcgcagattggagctgagctgtggctgccagaagatagcgaacgaatggaaactgaaagtggaaatcaggaaaaggtaatggaagaagaaagcactgaaaagaaaaaagaagttgaaaaaaagaaacggtcacgagttaaacaggtgcttgcagatattgctaagcaagtggacttctggtttggggatgcaaatcttcacaaggatagatttcttcgagaacagatagaaaaatctagagatggatatgttgatatatcactacttgtgtcttttaacaaaatgaaaaaattgactactgatgggaagttaattgccagagcattgagaagttcagctgttgtagagcttgatttggaaggcaccagaatccggaggaaaaaacctctgggggaaagaccaaaggatgaggatgaacgcacagtgtatgtggagttacttcccaaaaatgttaatcacagctggattgaaagagtatttgggaaatgtggcaatgttgtttatataagtataccacattataagtctactggagatccaaaggggtttgcgtttgtggaatttgaaacaaaagaacaagcagcaaaagcaattgagtttcttaacaacccaccagaagaagcaccaagaaaacctggcatatttcctaaaacagtgaaaaataagcccattccagccttaagagttgtggaagagaagaaaaagaaaaagaagaagaaaggcagaatgaaaaaggaagacaatatccaagccaaagaagaaaacatggacacaagcaacaccagcatcaccaaaatgaaaagatccagacccacatctgagggctctgacattgagtccactgaaccccaaaagcagtgctcaaagaaaaagaaaaaacgggacagagttgaagcatctagcttacctgaagtcagaacagggaagaggaagagaagcagctctgaagatgcagaatccctagctccccgatcaaaagtaaagaaaattattcagaaagacatcattaaggaagcatcagaagcttccaaggaaaatagagatatagaaatctctactgaagaggaaaaggatactggagatctaaaagatagctctctcttgaaaacaaaaaggaaacataagaaaaaacataaagagagacataaaatgggagaagaagttataccattaagagtgctatcaaagagcgaatggatggatttgaaaaaagagtatttagcgctacaaaaagctagcatggcttctttaaaaaaaacaatatcccaaataaaatcagagtcagaaatggaaacagacagtggagtacctcaaaacactggaatgaaaaatgaaaaaacagccaacagggaagagtgtcgcacccaggagaaagttaatgcaacaggaccacagttcgtgagtggagtgattgtgaagatcattagcacagagcctctacctggcaggaaacaagtccgggatactttggcagcaatctcagaagttctttatgttgatttgctagaaggggatacagaatgccatgctagatttaagactcctgaggatgctcaagcagtaataaatgcctatacagaaattaacaaggaacactgctggaaactcgagatcctttctggtgatcacgaacaaaggtattggcagaagattttggttgatagacaggcaaaacttaatcagcctcgggaaaagaaaagaggcactgaaaagttaatcaccaaagctgaaaagattagactggcaaagactcaacaagcgagtaaacatataagattttctgaatatgattgaaaaaaaaaacagttcacctcttaatacttcacaagatacttgagctgttcttgggagattcacttttattatggtagcactgcataattaatgtgtttttaattaaaagaaatatctttgttccttaacttgtaaataagacttttttctagagacaaatatgatgtataccacaatttttcttaaacattttatttgttgaaattatcttagatgtcagtgtcaggtgatttagtaaataaatgtgttttgaacattaaaa

SEQ ID NO: 68 - protein, 582 aa, Homo sapiens
METESGNQEKVMEEESTEKKKEVEKKKRSRVKQVLADIAKQVDFWFGDANLHKDRFLREQIEKSRDGYVDISLLVSFNKMKKLTTDGKLIARALRSSAVVELDLEGTRIRRKKPLGERPKDEDERTVYVELLPKNVNHSWIERVFGKCGNVVYISIPHYKSTGDPKGFAFVEFETKEQAAKAIEFLNNPPEEAPRKPGIFPKTVKNKPIPALRVVEEKKKKKKKKGRMKKEDNIQAKEENMDTSNTSITKMKRSRPTSEGSDIESTEPQKQCSKKKKKRDRVEASSLPEVRTGKRKRSSSEDAESLAPRSKVKKIIQKDIIKEASEASKENRDIEISTEEEKDTGDLKDSSLLKTKRKHKKKHKERHKMGEEVIPLRVLSKSEWMDLKKEYLALQKASMASLKKTISQIKSESEMETDSGVPQNTGMKNEKTANREECRTQEKVNATGPQFVSGVIVKIISTEPLPGRKQVRDTLAAISEVLYVDLLEGDTECHARFKTPEDAQAVINAYTEINKEHCWKLEILSGDHEQRYWQKILVDRQAKLNQPREKKRGTEKLITKAEKIRLAKTQQASKHIRFSEYD

SEQ ID NO: 69 - DNA, 2060 bp, Homo sapiens
  CDS (50)..(1798)
gtccgaaggccgcagtacttgaccctgtattttgggagtcgaacggagaatggaaactgaaagtggaaatcaggaaaaggtaatggaagaagaaagcactgaaaagaaaaaagaagttgaaaaaaagaaacggtcacgagttaaacaggtgcttgcagatattgctaagcaagtggacttctggtttggggatgcaaatcttcacaaggatagatttcttcgagaacagatagaaaaatctagagatggatatgttgatatatcactacttgtgtcttttaacaaaatgaaaaaattgactactgatgggaagttaattgccagagcattgagaagttcagctgttgtagagcttgatttggaaggcaccagaatccggaggaaaaaacctctgggggaaagaccaaaggatgaggatgaacgcacagtgtatgtggagttacttcccaaaaatgttaatcacagctggattgaaagagtatttgggaaatgtggcaatgttgtttatataagtataccacattataagtctactggagatccaaaggggtttgcgtttgtggaatttgaaacaaaagaacaagcagcaaaagcaattgagtttcttaacaacccaccagaagaagcaccaagaaaacctggcatatttcctaaaacagtgaaaaataagcccattccagccttaagagttgtggaagagaagaaaaagaaaaagaagaagaaaggcagaatgaaaaaggaagacaatatccaagccaaagaagaaaacatggacacaagcaacaccagcatcaccaaaatgaaaagatccagacccacatctgagggctctgacattgagtccactgaaccccaaaagcagtgctcaaagaaaaagaaaaaacgggacagagttgaagcatctagcttacctgaagtcagaacagggaagaggaagagaagcagctctgaagatgcagaatccctagctccccgatcaaaagtaaagaaaattattcagaaagacatcattaaggaagcatcagaagcttccaaggaaaatagagatatagaaatctctactgaagaggaaaaggatactggagatctaaaagatagctctctcttgaaaacaaaaaggaaacataagaaaaaacataaagagagacataaaatgggagaagaagttataccattaagagtgctatcaaagagcgaatggatggatttgaaaaaagagtatttagcgctacaaaaagctagcatggcttctttaaaaaaaacaatatcccaaataaaatcagagtcagaaatggaaacagacagtggagtacctcaaaacactggaatgaaaaatgaaaaaacagccaacagggaagagtgtcgcacccaggagaaagttaatgcaacaggaccacagttcgtgagtggagtgattgtgaagatcattagcacagagcctctacctggcaggaaacaagtccgggatactttggcagcaatctcagaagttctttatgttgatttgctagaaggggatacagaatgccatgctagatttaagactcctgaggatgctcaagcagtaataaatgcctatacagaaattaacaaggaacactgctggaaactcgagatcctttctggtgatcacgaacaaaggtattggcagaagattttggttgatagacaggcaaaacttaatcagcctcgggaaaagaaaagaggcactgaaaagttaatcaccaaagctgaaaagattagactggcaaagactcaacaagcgagtaaacatataagattttctgaatatgattgaaaaaaaaaacagttcacctcttaatacttcacaagatacttgagctgttcttgggagattcacttttattatggtagcactgcataattaatgtgtttttaattaaaagaaatatctttgttccttaacttgtaaataagacttttttctagagacaaatatgatgtataccacaatttttcttaaacattttatttgttgaaattatcttagatgtcagtgtcaggtgatttagtaaataaatgtgttttgaacattaaaa

SEQ ID NO: 70 - protein, 582 aa, Homo sapiens; identical to SEQ ID NO: 68

SEQ ID NO: 71 - DNA, 8426 bp, Homo sapiens
  CDS (261)..(7391)
cggagttaaccgaagagggggtcgaggagagccggagtcggggacccaggagtttcctgtgtccagcgctgccggagccgcctgaggtgccatgtttcagaacagagtaagacccctggtaaagaagaactgaagatattatacagataccagatatagcctaattacaaagaaagcattaacctgcctctgaggtgactaaaggggaataatggtgattttgcgccgggctcggccgcctgcttccgccccaaccagcaatgaatcttgactcgctctcgctggccttgtctcaaatcagctacctggtggacaatttaaccaagaaaaattaccgagccagccagcaggaaatacagcatattgtgaatcggcacggtcctgaggcagacaggcatttattacgctgcctattttcgcatgtggatttcagtggcgatggtaaaagcagtggcaaagatttccatcagactcagtttctgattcaggagtgtgcgttgctgattacaaagccaaattttatctcgacgctgtcctatgccattgataatccattgcactatcagaagagtttaaagcctgcaccccacttatttgcccagctgagtaaagtgctcaaattaagcaaagtacaagaggtaatttttggccttgccctgttgaattcttccagctcagatcttagaggtttcgctgcccagtttatcaaacagaagcttccagatcttctgcgttcttacattgacgcagacgtcagtggaaatcaagaaggtggcttccaagatatagcaatagaggtcctacacctcctcctctcccatctcctctttgggcagaagggagcctttggagttggacaagaacagatagacgcttttcttaagacgctgcgcagagattttccccaagaacgctgtcccgtggtgctcgcaccacttttataccctgaaaaacgggacattctaatggacaggatcctgcctgattccggaggggtatctaaaaccatgatggagagctctttggctgatttcatgcaagaagtaggctatggcttttgtgcaagtattgaagaatgtcgcaatataatcgtgcagtttggtgttcgggaggtcacagctgcccaggttgcaagggttttgggaatgatggctcgaactcattcaggattaacagatggcattccattacagagtatttctgctccgggcagtgggatctggagtgatgggaaagataaaagtgatggagcacaggcacacacatggaatgtagaagtcttgattgacgttcttaaagaactgaatccaagtttgaatttcaaggaagtaacttatgaactggaccatcctggatttcaaattcgtgacagtaaaggacttcataatgtggtttatggcattcagaggggtttgggtatggaagtgttcccagtagacctcatatatagaccttggaaacatgctgaaggccagctctccttcattcaacattcccttataaatccagagatcttctgttttgctgactatccctgtcatactgttgccactgatattctgaaagcaccaccagaggatgacaatcgagaaattgccacatggaagagcttggatttgattgaatctctgctgaggcttgcagaggttgggcagtatgagcaagtcaaacagctcttcagcttccctatcaaacactgtccagacatgctggtattggccttactacaaattaacacctcttggcataccttgcgccatgaacttatctccactctgatgccaattttccttggaaaccatcctaactcagctattattttgcactatgcatggcatgggcagggacagtctccctcaattcgccaacttatcatgcatgcaatggcagaatggtacatgagaggggagcagtatgatcaggccaaattgtctcgaatacttgatgtggcccaggacttgaaggccttgtcaatgctgctaaatggtactccatttgcctttgttattgaccttgctgcacttgcttcacgtcgtgaatacctcaaacttgataagtggctcacagataaaattcgagagcatggggagccttttatccaggcgtgtatgacttttttaaagagacggtgtccttctattttgggcggacttgccccagaaaaagaccagcccaaaagtgctcaacttcctccagaaactttggcgacaatgttggcctgtctgcaagcttgtgcagggagtgtttctcaggagctatcagaaactatcctcaccatggtagccaattgcagtaatgttatgaataaggccagacaaccaccacctggagttatgccaaaaggacgtcctcctagtgctagcagcttagatgccatttctcctgttcagattgaccctcttgctggaatgacatctcttagtataggtggttcagctgcccctcacacccagagtatgcagggttttcctccaaatttgggttctgcattcagtacccctcagtcaccagcaaaagcatttccacccctttcaacccccaatcagaccactgcattcagtggtattggaggactttcatcacagcttccagtaggtggtcttggcacaggcagcctgactggtataggaactggtgctcttggactccctgcagtgaataacgacccttttgtacagaggaaactgggcacctctggactgaatcagcctacattccagcagagtaagatgaaaccttcggacttgtctcaggtgtggccagaggcaaaccagcactttagtaaagagatagatgatgaagcaaacagctatttccagcgaatatataatcatccaccacatccaaccatgtctgttgatgaggtattagaaatgctgcagagatttaaagactctactataaagagggaacgagaagtatttaactgtatgctaaggaacttgtttgaagaatatcgtttttttccccagtatcctgataaagagttacatataacagcctgcctatttggtggtataattgagaaaggactggtcacttacatggcactaggtctggctctacgatatgttcttgaagccttacgcaagccttttggatccaaaatgtattatttcgggattgctgcactagatagatttaaaaacagattgaaggactatccccagtattgtcagcatttggcttctatcagtcactttatgcaatttccacatcatttacaggagtatattgagtatggacagcagtctagagatcctcctgtgaaaatgcaaggctctatcacaacccctggaagtattgcactggctcaggcccaggctcaggcccaggttccagcaaaagctcctcttgctggtcaagttagcactatggtaaccacctcaacaactaccactgttgctaaaacggttacggtcaccaggccaactggagtcagctttaagaaagatgtgccaccttctattaatactacaaatatagatacgttgcttgtggccacagatcaaactgagagaattgtggagcccccagaaaatatccaggagaaaattgcttttattttcaataatctctcacagtcaaatatgacacaaaaggttgaagagctaaaggaaacggtgaaagaagaatttatgccttgggtttcacagtatctggttatgaagagagtcagtattgagccaaactttcatagcctgtattcaaacttccttgacacgctgaagaatcctgaatttaacaagatggttctgaatgagacctacagaaacattaaagtgctcctgacctctgataaagctgcagccaatttctcagatcgttctttgctgaagaacttgggacattggctaggaatgatcacattagctaaaaacaaacccatcttacacactgacttggatgtgaaatcattgctgctagaggcttatgttaaaggacaacaagaattgctctatgtagtgccctttgttgccaaagtcttagaatctagcattcgtagtgtggtttttaggccaccaaacccttggacaatggcaattatgaatgtattagctgagctacatcaggagcatgacttaaagttaaacttgaagtttgaaatcgaggttctctgcaagaaccttgcattagacatcaatgagctaaaacctggaaacctcctaaaggataaagatcgcctgaagaatttagatgagcaactctctgctccaaagaaagatgtcaagcagccagaagaactccctcccatcacaaccacaacaacttctactacaccagctaccaacaccacttgtacagccacggttccaccacagccacagtacagctaccacgacatcaatgtctattcccttgcgggcttggcaccacacattactctaaatccaacaattcccttgtttcaggcccatccacagttgaagcagtgtgtgcgtcaggcaattgaacgggctgtccaggagctggtccatcctgtggtggatcgatcaattaagattgccatgactacttgtgagcaaatagtcaggaaggattttgccctggattcggaggaatctcgaatgcgaatagcagctcatcacatgatgcgtaacttgacagctggaatggctatgattacatgcagggaacctttgctcatgagcatatctaccaacttaaaaaacagttttgcctcagcccttcgtactgcttccccacaacaaagagaaatgatggatcaggcagctgctcaattagctcaggacaattgtgagttggcttgctgttttattcagaagactgcagtagaaaaagcaggccctgagatggacaagagattagcaactgaatttgagctgagaaaacatgctaggcaagaaggacgcagatactgtgatcctgttgttttaacatatcaagctgaacggatgccagagcaaatcaggctgaaagttggtggtgtggacccaaagcagttggctgtttacgaagagtttgcacgcaatgttcctggcttcttacctacaaatgacttaagtcagcccacgggatttttagcccagcccatgaagcaagcttgggcaacagatgatgtagctcagatttatgataagtgtattacagaactggagcaacatctacatgccatcccaccaactttggccatgaaccctcaagctcaggctcttcgaagtctcttggaggttgtagttttatctcgaaactctcgggatgccatagctgctcttggattgctccaaaaggctgtagagggcttactagatgccacaagtggtgctgatgctgaccttctgctgcgctacagggaatgccacctcttggtcctaaaagctctgcaggatggccgggcatatgggtctccatggtgcaacaaacagatcacaaggtgcctaattgaatgtcgagatgaatataaatataatgtggaggctgtggagctgctaattcgcaatcatttggttaatatgcagcagtatgatcttcacctagcgcagtcaatggagaatggcttaaactacatggctgtggcatttgctatgcagttagtaaaaatcctgctggtggatgaaaggagtgttgctcatgttactgaggcagatctgttccacaccattgaaaccctcatgaggattaatgctcattccagaggcaatgctccagaaggattgccccagctgatggaagtagtgcgatccaactatgaagcaatgattgatcgtgctcatggaggcccaaactttatgatgcattctgggatctctcaagcctcagagtatgatgaccctccaggcctgagggagaaggcagagtatcttctgagggaatgggtgaatctctaccattcagcagcagctggccgcgacagtaccaaagctttctctgcatttgttggacagatgcaccagcaaggaatactgaagaccgatgatctcataacaaggttctttcgtctgtgtactgaaatgtgtgttgaaatcagttaccgtgctcaggctgagcagcagcacaatcctgctgccaatcccaccatgatccgagccaagtgctatcacaacctggatgcctttgttcgactcattgcactgctcgtgaaacactcaggggaggccaccaacactgtcacaaagattaatctgctgaacaaggtccttggtatagtagtgggagttctccttcaggatcatgatgttcgtcagagtgaatttcagcaacttccctaccatcgaatttttatcatgcttctcttggaactcaatgcacctgagcatgtgttggaaaccattaatttccagacacttacagctttctgcaatacattccacatcttgaggcctaccaaagctcctggctttgtatatgcctggcttgaactgatttcccatcggatatttattgcaagaatgctggcacatacgccacagcagaaggggtggcctatgtatgcacagctactgattgatttattcaaatatttagcgcctttccttagaaatgtggaactcaccaaacctatgcaaatcctctacaagggcactttaagagtgctgctggttcttttgcatgatttcccagagttcctttgtgattaccattatgggttctgtgatgtgatcccacctaattgtatccagttaagaaatttgatcctgagtgcctttccaagaaacatgaggctccccgacccattcactcctaatctaaaggtggacatgttgagtgaaattaacattgctccccggattctcaccaatttcactggagtaatgccacctcagttcaaaaaggatttggattcctatcttaaaactcgatcaccagtcactttcctgtctgatctgcgcagcaacctacaggtatccaatgaacctgggaatcgctacaacctccagctcatcaatgcactggtgctctatgtcgggactcaggccattgcgcacatccacaacaagggcagcacaccttcaatgagcaccatcactcactcagcacacatggatatcttccagaatttggctgtggacttggacactgagggtcgctatctctttttgaatgcaattgcaaatcagctccggtacccaaatagccacactcactacttcagttgcaccatgctgtacctttttgcagaggccaatacggaagccatccaagaacagatcacaagagttctcttggaacggttgattgtaaataggccacatccttggggtcttcttattaccttcattgagctgattaaaaacccagcgtttaagttctggaaccatgaatttgtacactgtgccccagaaatcgaaaagttattccagtcggtcgcacagtgctgcatgggacagaagcaggcccagcaagtaatggaagggacaggtgccagttagacgaaactgcatctctgttgtacgtgtcagtctagaggtctcactgcaccgagttcataaactgactgaagaatcctttcagctcttcctgactttcccagccctttggtttgtgggtatctgccccaactactgttgggatcagcctcctgtcttatgtgggcacgttccaaagtttaaatgcatttttttgactcttggccaaaatttagaagatgctgtgaatatcattttgaacttgtgtaaatacatgaaagagaaaacctttgtctggaacttcttggctttgtgcaagctgtgtccaaggcaagtacataaactggtaccttgtaatgaagaggcagctgatgccatgcacttgtctgagggcatagctccatgtcttctgacattcctggtgtcccaaagaatagcaaaaagccagtttgaatattatgtaacttatttttttaatgtggacaggggaccttgaaaatcactaagttattaaaaatgtgggatgtgctagaattggatatgtccaggaacatgggaagggctcactattggaatcccatgagtttccattttgtctctacccaaacgtattccaaagctgactgcatttgtaccatcttatttcttttggggattatacacctcagccgcctgagatgggggtcagctctttatataaagggaaaccagaccaggcctaaagcccaccccctaccctcacccccacaatcctctcctgaaacttaaaaacagtgggaatataggaaagggaaccaaatctcattaattaattgttctcccccattaccccactgaatgaatggccatacaggctaagctgaataatgacaaagttgaaaggaccaatacagccccttttataaggattttgaatgttttgcaaatgtattggtccctgtgttgtattttgtagccttttcctgggcttcagctcccctacttcttgtatgtgtatgcatactgtagctaaccattaaagtcatgacacacaaaaaaaaaaaaaaaaaaaaaaaaaaa

SEQ ID NO: 72 - protein, 2376 aa, Homo sapiens
MNLDSLSLALSQISYLVDNLTKKNYRASQQEIQHIVNRHGPEADRHLLRCLFSHVDFSGDGKSSGKDFHQTQFLIQECALLITKPNFISTLSYAIDNPLHYQKSLKPAPHLFAQLSKVLKLSKVQEVIFGLALLNSSSSDLRGFAAQFIKQKLPDLLRSYIDADVSGNQEGGFQDIAIEVLHLLLSHLLFGQKGAFGVGQEQIDAFLKTLRRDFPQERCPVVLAPLLYPEKRDILMDRILPDSGGVSKTMMESSLADFMQEVGYGFCASIEECRNIIVQFGVREVTAAQVARVLGMMARTHSGLTDGIPLQSISAPGSGIWSDGKDKSDGAQAHTWNVEVLIDVLKELNPSLNFKEVTYELDHPGFQIRDSKGLHNVVYGIQRGLGMEVFPVDLIYRPWKHAEGQLSFIQHSLINPEIFCFADYPCHTVATDILKAPPEDDNREIATWKSLDLIESLLRLAEVGQYEQVKQLFSFPIKHCPDMLVLALLQINTSWHTLRHELISTLMPIFLGNHPNSAIILHYAWHGQGQSPSIRQLIMHAMAEWYMRGEQYDQAKLSRILDVAQDLKALSMLLNGTPFAFVIDLAALASRREYLKLDKWLTDKIREHGEPFIQACMTFLKRRCPSILGGLAPEKDQPKSAQLPPETLATMLACLQACAGSVSQELSETILTMVANCSNVMNKARQPPPGVMPKGRPPSASSLDAISPVQIDPLAGMTSLSIGGSAAPHTQSMQGFPPNLGSAFSTPQSPAKAFPPLSTPNQTTAFSGIGGLSSQLPVGGLGTGSLTGIGTGALGLPAVNNDPFVQRKLGTSGLNQPTFQQSKMKPSDLSQVWPEANQHFSKEIDDEANSYFQRIYNHPPHPTMSVDEVLEMLQRFKDSTIKREREVFNCMLRNLFEEYRFFPQYPDKELHITACLFGGIIEKGLVTYMALGLALRYVLEALRKPFGSKMYYFGIAALDRFKNRLKDYPQYCQHLASISHFMQFPHHLQEYIEYGQQSRDPPVKMQGSITTPGSIALAQAQAQAQVPAKAPLAGQVSTMVTTSTTTTVAKTVTVTRPTGVSFKKDVPPSINTTNIDTLLVATDQTERIVEPPENIQEKIAFIFNNLSQSNMTQKVEELKETVKEEFMPWVSQYLVMKRVSIEPNFHSLYSNFLDTLKNPEFNKMVLNETYRNIKVLLTSDKAAANFSDRSLLKNLGHWLGMITLAKNKPILHTDLDVKSLLLEAYVKGQQELLYVVPFVAKVLESSIRSVVFRPPNPWTMAIMNVLAELHQEHDLKLNLKFEIEVLCKNLALDINELKPGNLLKDKDRLKNLDEQLSAPKKDVKQPEELPPITTTTTSTTPATNTTCTATVPPQPQYSYHDINVYSLAGLAPHITLNPTIPLFQAHPQLKQCVRQAIERAVQELVHPVVDRSIKIAMTTCEQIVRKDFALDSEESRMRIAAHHMMRNLTAGMAMITCREPLLMSISTNLKNSFASALRTASPQQREMMDQAAAQLAQDNCELACCFIQKTAVEKAGPEMDKRLATEFELRKHARQEGRRYCDPVVLTYQAERMPEQIRLKVGGVDPKQLAVYEEFARNVPGFLPTNDLSQPTGFLAQPMKQAWATDDVAQIYDKCITELEQHLHAIPPTLAMNPQAQALRSLLEVVVLSRNSRDAIAALGLLQKAVEGLLDATSGADADLLLRYRECHLLVLKALQDGRAYGSPWCNKQITRCLIECRDEYKYNVEAVELLIRNHLVNMQQYDLHLAQSMENGLNYMAVAFAMQLVKILLVDERSVAHVTEADLFHTIETLMRINAHSRGNAPEGLPQLMEVVRSNYEAMIDRAHGGPNFMMHSGISQASEYDDPPGLREKAEYLLREWVNLYHSAAAGRDSTKAFSAFVGQMHQQGILKTDDLITRFFRLCTEMCVEISYRAQAEQQHNPAANPTMIRAKCYHNLDAFVRLIALLVKHSGEATNTVTKINLLNKVLGIVVGVLLQDHDVRQSEFQQLPYHRIFIMLLLELNAPEHVLETINFQTLTAFCNTFHILRPTKAPGFVYAWLELISHRIFIARMLAHTPQQKGWPMYAQLLIDLFKYLAPFLRNVELTKPMQILYKGTLRVLLVLLHDFPEFLCDYHYGFCDVIPPNCIQLRNLILSAFPRNMRLPDPFTPNLKVDMLSEINIAPRILTNFTGVMPPQFKKDLDSYLKTRSPVTFLSDLRSNLQVSNEPGNRYNLQLINALVLYVGTQAIAHIHNKGSTPSMSTITHSAHMDIFQNLAVDLDTEGRYLFLNAIANQLRYPNSHTHYFSCTMLYLFAEANTEAIQEQITRVLLERLIVNRPHPWGLLITFIELIKNPAFKFWNHEFVHCAPEIEKLFQSVAQCCMGQKQAQQVMEGTGAS

SEQ ID NO: 73 - DNA, 3664 bp, Homo sapiens
  CDS (425)..(2800)
tgttgggaggagggtcgaagcgtatactggccacgcccgggtcccgctctctcgttgcacaactgcaagctagatctgggcatcgaaggaggaacgctgcaacctccaaccccttctttctgaccaaccgggaccagagcagtgctggggccggggcgggtcaccgggtgaggaccggggcggagggtgttaagttacagggcaggagcccgggtccctccgcgggcaggaaggggagggcccatcggggctaggggaaccccggcgcagacctggggtggggtcggaaaagctgtttcatcgcccgctcccgggccctccgctccctccctccctccctctctccctggcaggactccccgccaggcctccccgccactctccgcggcgcattccgggaggcagcggccgcagcggcctcgccatgtcccagcccggccagaagcccgccgcctccccgcggccccggcgagcagccgccgcccgccgcacccatgagcatgtcagtgaaaaaaccagtgaatcgccttccaaaccaggagaaaagaaaggatcagatgagaaaaaagcagcaagcctcggcagcagtcaatcctccagaacctatgctggtggaacagcctcggccaccaaggtgtcagcttcctctggtgcaaccagcaagtcttccagtatgaatcccacagaaaccaaggccattccagtcagccaacagatggaaggaccacatcttcctaacaagaaaaaacacaaaaaacaggctgtaaaaacagaacctgagaagaagtcacagtcaaccaagctgtctgtggttcatgagaaaaaatcccaagaaggaaagccaaaagaacacacagagccaaaaagcctacccaagcaggcatcagatacaggaagtaacgatgctcacaataaaaaagcagtttccagatcagctgaacagcagccatcagagaaatcaacagaaccaaagactaaaccacaagacatgatttctgctggtggagagagtgttgctggtatcactgcaatatctggcaagccgggtgacaagaaaaaagaaaagaaatcattaaccccagctgtgccagttgaatctaaaccggataaaccatcgggaaagtcaggcatggatgctgctttggatgacttaatagatactttaggaggacctgaagaaactgaagaagaaaatacaacgtatactggaccagaagtttcagatccaatgagttccacctacatagaggaattgggtaaaagagaagtcacaattcctccaaaatatagggaactattggctaaaaaggaagggatcacagggcctcctgcagactcttcgaaacccatagggccagatgatgctatagacgccttgtcatctgacttcacctgtgggtcgcctacagctgctggaaagaaaactgaaaaagaggaatctacagaagttttaaaagctcagtcagcagggacagtcagaagtgctgctccaccccaagagaagaaaagaaaggtggagaaggatacaatgagtgatcaagcactcgaggctctgtcggcttcactgggcacccggcaagcagaacctgagctcgacctccgctcaattaaggaagtcgatgaggcaaaagctaaagaagaaaaactagagaagtgtggtgaggatgatgaaacaatcccatctgagtacagattaaaaccagccacggataaagatggaaaaccactattgccagagcctgaagaaaaacccaagcctcggagtgaatcagaactcattgatgaactttcagaagattttgaccggtctgaatgtaaagagaaaccatctaagccaactgaaaagacagaagaatctaaggccgctgctccagctcctgtgtcggaggctgtgtgtcggacctccatgtgtagtatacagtcagcaccccctgagccggctaccttgaagggcacagtgccagatgatgctgtagaagccttggctgatagcctggggaaaaaggaagcagatccagaagatggaaaacctgtgatggataaagtcaaggagaaggccaaagaagaagaccgtgaaaagcttggtgaaaaagaagaaacaattcctcctgattatagattagaagaggtcaaggataaagatggaaagccactcctgccaaaagagtctaaggaacagcttccacccatgagtgaagacttccttctggatgctttgtctgaggacttctctggtccacaaaatgcttcatctcttaaatttgaagatgctaaacttgctgctgccatctctgaagtggtttcccaaaccccagcttcaacgacccaagctggagccccaccccgtgatacctcgcagagtgacaaagacctcgatgatgccttggataaactctctgacagtctaggacaaaggcagcctgacccagatgagaacaaaccaatggaagataaagtaaaggaaaaagctaaagctgaacatagagacaagcttggagaaagagatgacactatcccacctgaatacagacatctcctggatgataatggacaggacaaaccagtgaagccacctacaaagaaatcagaggattcaaagaaacctgcagatgaccaagaccccattgatgctctctcaggagatctggacagctgtccctccactacagaaacctcacagaacacagcaaaggataagtgcaagaaggctgcttccagctccaaagcacctaagaatggaggtaaagcgaaggattcagcaaagacaacagaggaaacttccaagccaaaagatgactaaagaaatacaagttaaggtatctggtatctgcatgtaaaatcttcagctggtggatggtgacttttgaagaacaaaaggctttggcaacagaaaacaattgttctgggtgatttctagaatggtttttgttgagtctctgaacatcctaaatattggtttgttattcttttccagaaagaaaatgaatttgactggttcacctgtgtactgagtattgataaactttgaatttttttaattgccttcaattgggagagaaagctttatatttgtgtgaggacttctgcatcttacagtcagcacagaacacactgagacttgaatcaagtcagcaacagagcaaaataaaggttagataagtccttgtgtagcaaatttcgagcataagaaataaaatctaattaattcttagggtactcatctgacttgaactctgttggtttactgtgttagtaaactgtgctttctattatctatacataaaacctgagcagcaactgtgtctttagagctattgccacattagcctttgcactgtatagcgtctggctttatggaacttaagtttaccaaatataaaaagaaacttctgcttttaaaaaaattatatatatatattaaatttgaaacctgcatttctcccacagcaatgtaagaagtaggctctgatgtcctaccactttgaatggttttctaatatcttaatgaatagttcctgaacattgcactgatatcatcgattagaattttgatatttaatttcatctttatttcctggtagagaatgcacgacaagatgtcaggtacataacataaaacagattgggaatttattgtttccaaagggcatgcccttccttagca

SEQ ID NO: 74 - protein, 791 aa, Homo sapiens
MSQPGQKPAASPRPRRAAAARRTHEHVSEKTSESPSKPGEKKGSDEKKAASLGSSQSSRTYAGGTASATKVSASSGATSKSSSMNPTETKAIPVSQQMEGPHLPNKKKHKKQAVKTEPEKKSQSTKLSVVHEKKSQEGKPKEHTEPKSLPKQASDTGSNDAHNKKAVSRSAEQQPSEKSTEPKTKPQDMISAGGESVAGITAISGKPGDKKKEKKSLTPAVPVESKPDKPSGKSGMDAALDDLIDTLGGPEETEEENTTYTGPEVSDPMSSTYIEELGKREVTIPPKYRELLAKKEGITGPPADSSKPIGPDDAIDALSSDFTCGSPTAAGKKTEKEESTEVLKAQSAGTVRSAAPPQEKKRKVEKDTMSDQALEALSASLGTRQAEPELDLRSIKEVDEAKAKEEKLEKCGEDDETIPSEYRLKPATDKDGKPLLPEPEEKPKPRSESELIDELSEDFDRSECKEKPSKPTEKTEESKAAAPAPVSEAVCRTSMCSIQSAPPEPATLKGTVPDDAVEALADSLGKKEADPEDGKPVMDKVKEKAKEEDREKLGEKEETIPPDYRLEEVKDKDGKPLLPKESKEQLPPMSEDFLLDALSEDFSGPQNASSLKFEDAKLAAAISEVVSQTPASTTQAGAPPRDTSQSDKDLDDALDKLSDSLGQRQPDPDENKPMEDKVKEKAKAEHRDKLGERDDTIPPEYRHLLDDNGQDKPVKPPTKKSEDSKKPADDQDPIDALSGDLDSCPSTTETSQNTAKDKCKKAASSSKAPKNGGKAKDSAKTTEETSKPKDD

SEQ ID NO: 75 - DNA, 3598 bp, Homo sapiens
  CDS (425)..(2734)
tgttgggaggagggtcgaagcgtatactggccacgcccgggtcccgctctctcgttgcacaactgcaagctagatctgggcatcgaaggaggaacgctgcaacctccaaccccttctttctgaccaaccgggaccagagcagtgctggggccggggcgggtcaccgggtgaggaccggggcggagggtgttaagttacagggcaggagcccgggtccctccgcgggcaggaaggggagggcccatcggggctaggggaaccccggcgcagacctggggtggggtcggaaaagctgtttcatcgcccgctcccgggccctccgctccctccctccctccctctctccctggcaggactccccgccaggcctccccgccactctccgcggcgcattccgggaggcagcggccgcagcggcctcgccatgtcccagcccggccagaagcccgccgcctccccgcggccccggcgagcagccgccgcccgccgcacccatgagcatgtcagtgaaaaaaccagtgaatcgccttccaaaccaggagaaaagaaaggatcagatgagaaaaaagcagcaagcctcggcagcagtcaatcctccagaacctatgctggtggaacagcctcggccaccaaggtgtcagcttcctctggtgcaaccagcaagtcttccagtatgaatcccacagaaaccaaggctgtaaaaacagaacctgagaagaagtcacagtcaaccaagctgtctgtggttcatgagaaaaaatcccaagaaggaaagccaaaagaacacacagagccaaaaagcctacccaagcaggcatcagatacaggaagtaacgatgctcacaataaaaaagcagtttccagatcagctgaacagcagccatcagagaaatcaacagaaccaaagactaaaccacaagacatgatttctgctggtggagagagtgttgctggtatcactgcaatatctggcaagccgggtgacaagaaaaaagaaaagaaatcattaaccccagctgtgccagttgaatctaaaccggataaaccatcgggaaagtcaggcatggatgctgctttggatgacttaatagatactttaggaggacctgaagaaactgaagaagaaaatacaacgtatactggaccagaagtttcagatccaatgagttccacctacatagaggaattgggtaaaagagaagtcacaattcctccaaaatatagggaactattggctaaaaaggaagggatcacagggcctcctgcagactcttcgaaacccatagggccagatgatgctatagacgccttgtcatctgacttcacctgtgggtcgcctacagctgctggaaagaaaactgaaaaagaggaatctacagaagttttaaaagctcagtcagcagggacagtcagaagtgctgctccaccccaagagaagaaaagaaaggtggagaaggatacaatgagtgatcaagcactcgaggctctgtcggcttcactgggcacccggcaagcagaacctgagctcgacctccgctcaattaaggaagtcgatgaggcaaaagctaaagaagaaaaactagagaagtgtggtgaggatgatgaaacaatcccatctgagtacagattaaaaccagccacggataaagatggaaaaccactattgccagagcctgaagaaaaacccaagcctcggagtgaatcagaactcattgatgaactttcagaagattttgaccggtctgaatgtaaagagaaaccatctaagccaactgaaaagacagaagaatctaaggccgctgctccagctcctgtgtcggaggctgtgtgtcggacctccatgtgtagtatacagtcagcaccccctgagccggctaccttgaagggcacagtgccagatgatgctgtagaagccttggctgatagcctggggaaaaaggaagcagatccagaagatggaaaacctgtgatggataaagtcaaggagaaggccaaagaagaagaccgtgaaaagcttggtgaaaaagaagaaacaattcctcctgattatagattagaagaggtcaaggataaagatggaaagccactcctgccaaaagagtctaaggaacagcttccacccatgagtgaagacttccttctggatgctttgtctgaggacttctctggtccacaaaatgcttcatctcttaaatttgaagatgctaaacttgctgctgccatctctgaagtggtttcccaaaccccagcttcaacgacccaagctggagccccaccccgtgatacctcgcagagtgacaaagacctcgatgatgccttggataaactctctgacagtctaggacaaaggcagcctgacccagatgagaacaaaccaatggaagataaagtaaaggaaaaagctaaagctgaacatagagacaagcttggagaaagagatgacactatcccacctgaatacagacatctcctggatgataatggacaggacaaaccagtgaagccacctacaaagaaatcagaggattcaaagaaacctgcagatgaccaagaccccattgatgctctctcaggagatctggacagctgtccctccactacagaaacctcacagaacacagcaaaggataagtgcaagaaggctgcttccagctccaaagcacctaagaatggaggtaaagcgaaggattcagcaaagacaacagaggaaacttccaagccaaaagatgactaaagaaatacaagttaaggtatctggtatctgcatgtaaaatcttcagctggtggatggtgacttttgaagaacaaaaggctttggcaacagaaaacaattgttctgggtgatttctagaatggtttttgttgagtctctgaacatcctaaatattggtttgttattcttttccagaaagaaaatgaatttgactggttcacctgtgtactgagtattgataaactttgaatttttttaattgccttcaattgggagagaaagctttatatttgtgtgaggacttctgcatcttacagtcagcacagaacacactgagacttgaatcaagtcagcaacagagcaaaataaaggttagataagtccttgtgtagcaaatttcgagcataagaaataaaatctaattaattcttagggtactcatctgacttgaactctgttggtttactgtgttagtaaactgtgctttctattatctatacataaaacctgagcagcaactgtgtctttagagctattgccacattagcctttgcactgtatagcgtctggctttatggaacttaagtttaccaaatataaaaagaaacttctgcttttaaaaaaattatatatatatattaaatttgaaacctgcatttctcccacagcaatgtaagaagtaggctctgatgtcctaccactttgaatggttttctaatatcttaatgaatagttcctgaacattgcactgatatcatcgattagaattttgatatttaatttcatctttatttcctggtagagaatgcacgacaagatgtcaggtacataacataaaacagattgggaatttattgtttccaaagggcatgcccttccttagca

SEQ ID NO: 76 - protein, 769 aa, Homo sapiens
MSQPGQKPAASPRPRRAAAARRTHEHVSEKTSESPSKPGEKKGSDEKKAASLGSSQSSRTYAGGTASATKVSASSGATSKSSSMNPTETKAVKTEPEKKSQSTKLSVVHEKKSQEGKPKEHTEPKSLPKQASDTGSNDAHNKKAVSRSAEQQPSEKSTEPKTKPQDMISAGGESVAGITAISGKPGDKKKEKKSLTPAVPVESKPDKPSGKSGMDAALDDLIDTLGGPEETEEENTTYTGPEVSDPMSSTYIEELGKREVTIPPKYRELLAKKEGITGPPADSSKPIGPDDAIDALSSDFTCGSPTAAGKKTEKEESTEVLKAQSAGTVRSAAPPQEKKRKVEKDTMSDQALEALSASLGTRQAEPELDLRSIKEVDEAKAKEEKLEKCGEDDETIPSEYRLKPATDKDGKPLLPEPEEKPKPRSESELIDELSEDFDRSECKEKPSKPTEKTEESKAAAPAPVSEAVCRTSMCSIQSAPPEPATLKGTVPDDAVEALADSLGKKEADPEDGKPVMDKVKEKAKEEDREKLGEKEETIPPDYRLEEVKDKDGKPLLPKESKEQLPPMSEDFLLDALSEDFSGPQNASSLKFEDAKLAAAISEVVSQTPASTTQAGAPPRDTSQSDKDLDDALDKLSDSLGQRQPDPDENKPMEDKVKEKAKAEHRDKLGERDDTIPPEYRHLLDDNGQDKPVKPPTKKSEDSKKPADDQDPIDALSGDLDSCPSTTETSQNTAKDKCKKAASSSKAPKNGGKAKDSAKTTEETSKPKDD

SEQ ID NO: 77 - DNA, 3541 bp, Homo sapiens
  CDS (425)..(2677)
tgttgggaggagggtcgaagcgtatactggccacgcccgggtcccgctctctcgttgcacaactgcaagctagatctgggcatcgaaggaggaacgctgcaacctccaaccccttctttctgaccaaccgggaccagagcagtgctggggccggggcgggtcaccgggtgaggaccggggcggagggtgttaagttacagggcaggagcccgggtccctccgcgggcaggaaggggagggcccatcggggctaggggaaccccggcgcagacctggggtggggtcggaaaagctgtttcatcgcccgctcccgggccctccgctccctccctccctccctctctccctggcaggactccccgccaggcctccccgccactctccgcggcgcattccgggaggcagcggccgcagcggcctcgccatgtcccagcccggccagaagcccgccgcctccccgcggccccggcgagcagccgccgcccgccgcacccatgagcatgtcagtgaaaaaaccagtgaatcgccttccaaaccaggagaaaagaaaggatcagatgagaaaaaagcagcaagcctcggcagcagtcaatcctccagaacctatgctggtggaacagcctcggccaccaaggtgtcagcttcctctggtgcaaccagcaagtcttccagtatgaatcccacagaaaccaaggctgtaaaaacagaacctgagaagaagtcacagtcaaccaagccaaaaagcctacccaagcaggcatcagatacaggaagtaacgatgctcacaataaaaaagcagtttccagatcagctgaacagcagccatcagagaaatcaacagaaccaaagactaaaccacaagacatgatttctgctggtggagagagtgttgctggtatcactgcaatatctggcaagccgggtgacaagaaaaaagaaaagaaatcattaaccccagctgtgccagttgaatctaaaccggataaaccatcgggaaagtcaggcatggatgctgctttggatgacttaatagatactttaggaggacctgaagaaactgaagaagaaaatacaacgtatactggaccagaagtttcagatccaatgagttccacctacatagaggaattgggtaaaagagaagtcacaattcctccaaaatatagggaactattggctaaaaaggaagggatcacagggcctcctgcagactcttcgaaacccatagggccagatgatgctatagacgccttgtcatctgacttcacctgtgggtcgcctacagctgctggaaagaaaactgaaaaagaggaatctacagaagttttaaaagctcagtcagcagggacagtcagaagtgctgctccaccccaagagaagaaaagaaaggtggagaaggatacaatgagtgatcaagcactcgaggctctgtcggcttcactgggcacccggcaagcagaacctgagctcgacctccgctcaattaaggaagtcgatgaggcaaaagctaaagaagaaaaactagagaagtgtggtgaggatgatgaaacaatcccatctgagtacagattaaaaccagccacggataaagatggaaaaccactattgccagagcctgaagaaaaacccaagcctcggagtgaatcagaactcattgatgaactttcagaagattttgaccggtctgaatgtaaagagaaaccatctaagccaactgaaaagacagaagaatctaaggccgctgctccagctcctgtgtcggaggctgtgtgtcggacctccatgtgtagtatacagtcagcaccccctgagccggctaccttgaagggcacagtgccagatgatgctgtagaagccttggctgatagcctggggaaaaaggaagcagatccagaagatggaaaacctgtgatggataaagtcaaggagaaggccaaagaagaagaccgtgaaaagcttggtgaaaaagaagaaacaattcctcctgattatagattagaagaggtcaaggataaagatggaaagccactcctgccaaaagagtctaaggaacagcttccacccatgagtgaagacttccttctggatgctttgtctgaggacttctctggtccacaaaatgcttcatctcttaaatttgaagatgctaaacttgctgctgccatctctgaagtggtttcccaaaccccagcttcaacgacccaagctggagccccaccccgtgatacctcgcagagtgacaaagacctcgatgatgccttggataaactctctgacagtctaggacaaaggcagcctgacccagatgagaacaaaccaatggaagataaagtaaaggaaaaagctaaagctgaacatagagacaagcttggagaaagagatgacactatcccacctgaatacagacatctcctggatgataatggacaggacaaaccagtgaagccacctacaaagaaatcagaggattcaaagaaacctgcagatgaccaagaccccattgatgctctctcaggagatctggacagctgtccctccactacagaaacctcacagaacacagcaaaggataagtgcaagaaggctgcttccagctccaaagcacctaagaatggaggtaaagcgaaggattcagcaaagacaacagaggaaacttccaagccaaaagatgactaaagaaatacaagttaaggtatctggtatctgcatgtaaaatcttcagctggtggatggtgacttttgaagaacaaaaggctttggcaacagaaaacaattgttctgggtgatttctagaatggtttttgttgagtctctgaacatcctaaatattggtttgttattcttttccagaaagaaaatgaatttgactggttcacctgtgtactgagtattgataaactttgaatttttttaattgccttcaattgggagagaaagctttatatttgtgtgaggacttctgcatcttacagtcagcacagaacacactgagacttgaatcaagtcagcaacagagcaaaataaaggttagataagtccttgtgtagcaaatttcgagcataagaaataaaatctaattaattcttagggtactcatctgacttgaactctgttggtttactgtgttagtaaactgtgctttctattatctatacataaaacctgagcagcaactgtgtctttagagctattgccacattagcctttgcactgtatagcgtctggctttatggaacttaagtttaccaaatataaaaagaaacttctgcttttaaaaaaattatatatatatattaaatttgaaacctgcatttctcccacagcaatgtaagaagtaggctctgatgtcctaccactttgaatggttttctaatatcttaatgaatagttcctgaacattgcactgatatcatcgattagaattttgatatttaatttcatctttatttcctggtagagaatgcacgacaagatgtcaggtacataacataaaacagattgggaatttattgtttccaaagggcatgcccttccttagca

SEQ ID NO: 78 - protein, 750 aa, Homo sapiens
MSQPGQKPAASPRPRRAAAARRTHEHVSEKTSESPSKPGEKKGSDEKKAASLGSSQSSRTYAGGTASATKVSASSGATSKSSSMNPTETKAVKTEPEKKSQSTKPKSLPKQASDTGSNDAHNKKAVSRSAEQQPSEKSTEPKTKPQDMISAGGESVAGITAISGKPGDKKKEKKSLTPAVPVESKPDKPSGKSGMDAALDDLIDTLGGPEETEEENTTYTGPEVSDPMSSTYIEELGKREVTIPPKYRELLAKKEGITGPPADSSKPIGPDDAIDALSSDFTCGSPTAAGKKTEKEESTEVLKAQSAGTVRSAAPPQEKKRKVEKDTMSDQALEALSASLGTRQAEPELDLRSIKEVDEAKAKEEKLEKCGEDDETIPSEYRLKPATDKDGKPLLPEPEEKPKPRSESELIDELSEDFDRSECKEKPSKPTEKTEESKAAAPAPVSEAVCRTSMCSIQSAPPEPATLKGTVPDDAVEALADSLGKKEADPEDGKPVMDKVKEKAKEEDREKLGEKEETIPPDYRLEEVKDKDGKPLLPKESKEQLPPMSEDFLLDALSEDFSGPQNASSLKFEDAKLAAAISEVVSQTPASTTQAGAPPRDTSQSDKDLDDALDKLSDSLGQRQPDPDENKPMEDKVKEKAKAEHRDKLGERDDTIPPEYRHLLDDNGQDKPVKPPTKKSEDSKKPADDQDPIDALSGDLDSCPSTTETSQNTAKDKCKKAASSSKAPKNGGKAKDSAKTTEETSKPKDD

SEQ ID NO: 79 - DNA, 9058 bp, Homo sapiens
  CDS (44)..(7699)
agtgtaatttgagaccggtggtaaggattggagcgagctagagatgctgcacgctgctaacaagggaaggaagccttcagctgaggcaggtcgtcccattccacctacatcctcgcctagtctcctcccatctgctcagctgcctagctcccataatcctccaccagttagctgccagatgccattgctagacagcaacacctcccatcaaatcatggacaccaaccctgatgaggaattctcccccaattcatacctgctcagagcatgctcagggccccagcaagcctccagcagtggccctccgaaccaccacagccagtcgactctgaggccccctctcccaccccctcacaaccacacgctgtcccatcaccactcgtccgccaactccctcaacaggaactcactgaccaatcggcggagtcagatccacgccccggccccagcgcccaatgacctggccaccacaccagagtccgttcagcttcaggacagctgggtgctaaacagcaacgtgccactggagacccggcacttcctcttcaagacctcctcggggagcacacccttgttcagcagctcttccccgggataccctttgacctcaggaacggtttacacgcccccgccccgcctgctgcccaggaatactttctccaggaaggctttcaagctgaagaagccctccaaatactgcagctggaaatgtgctgccctctccgccattgccgcggccctcctcttggctattttgctggcgtatttcatagcaatgcatctgctcggactcaattggcaactccagcctgcagatgggcacacctttaacaatgggataaggaccggcttaccaggaaacgatgatgtggcaacaatgccatctggaggcaaagtgccctggtcgttgaaaaacagcagcatagacagtggtgaagcagaagttggtcggcgggtaacacaagaagtcccaccaggggtgttttggaggtcacaaattcacatcagtcagccccagttcttaaagttcaacatctccctcgggaaggacgctctctttggtgtttacataagaagaggacttccaccatctcatgcccagtatgacttcatggaacgtctggacgggaaggagaagtggagtgtggttgagtctcccagggaacgccggagcatacagaccttggttcagaatgaagccgtgtttgtgcagtacctggatgtgggcctgtggcatctggccttctacaatgatggaaaagacaaagagatggtttccttcaatactgttgtcctagattcagtgcaggactgtccacgtaactgccatgggaatggtgaatgtgtgtccggggtgtgtcactgtttcccaggatttctaggagcagactgtgctaaagctgcctgccctgtcctgtgcagtgggaatggacaatattctaaagggacgtgccagtgctacagcggctggaaaggtgcagagtgcgacgtgcccatgaatcagtgcatcgatccttcctgcgggggccacggctcctgcattgatgggaactgtgtctgctctgctggctacaaaggcgagcactgtgaggaagttgattgcttggatcccacctgctccagccacggagtctgtgtgaatggagaatgcctgtgcagccctggctggggtggtctgaactgtgagctggcgagggtccagtgcccagaccagtgcagtgggcatggcacgtacctgcctgacacgggcctctgcagctgcgatcccaactggatgggtcccgactgctctgttgatggctgccctgacttgtgcaacggtaacgggagatgcacactgggtcagaacagctggcagtgtgtctgccagaccggctggagagggcccggatgcaacgttgccatggaaacttcctgtgctgataacaaggataatgagggagatggcctggtggattgtttggaccctgactgctgcctgcagtcagcctgtcagaacagcctgctctgccgggggtcccgggacccactggacatcattcagcagggccagacggattggcccgcagtgaagtccttctatgaccgtatcaagctcttggcaggcaaggatagcacccacatcattcctggagagaaccctttcaacagcagcttggtttctctcatccgaggccaagtagtaactacagatggaactcccctggtcggtgtgaacgtgtcttttgtcaagtacccaaaatacggctacaccatcacccgccaggatggcacgttcgacctgatcgcaaatggaggtgcttccttgactctacactttgagcgagccccgttcatgagccaggagcgcactgtgtggctgccgtggaacagcttttacgccatggacaccctggtgatgaagaccgaggagaactccatccccagctgtgacctcagtggctttgtccggcctgatccaatcatcatctcctccccactgtccaccttctttagtgctgcccctgggcagaatcccatcgtgcctgagacccaggttcttcatgaagaaatcgagctccctggttccaatgtgaaacttcgctatctgagctctagaactgcagggtacaagtcactgctgaagatcaccatgacccagtccacagtgcccctgaacctcattagggttcacctgatggtggctgtcgaggggcatctcttccagaagtcattccaggcttctcccaacctggcctacaccttcatctgggacaagacagatgcgtatggccaaagggtgtatggactctcagatgctgttgtgtctgtcgggtttgaatatgagacctgtcccagtctaattctctgggagaaaaggacagccctccttcagggattcgagctggacccctccaacctcggtggctggtccctagacaaacaccacatcctcaatgttaaaagtggaatcctacacaaaggcactggggaaaaccagttcctgacccagcagcctgccatcatcaccagcatcatgggcaatggtcgccgccggagcatttcctgtcccagctgcaacggccttgctgaaggcaacaagctgctggccccagtggctctggctgttggaatcgatgggagcctctatgtgggtgacttcaattacatccgacgcatctttccctctcgaaatgtgaccagcatcttggagttacgaaataaagagtttaaacatagcaacaacccagcacacaagtactacttggcagtggaccccgtgtccggctcgctctacgtgtccgacaccaacagcaggagaatctaccgcgtcaagtctctgagtggaaccaaagacctggctgggaattcggaagttgtggcagggacgggagagcagtgtctaccctttgatgaagcccgctgcggggatggagggaaggccatagatgcaaccctgatgagcccgagaggtattgcagtagacaagaatgggctcatgtactttgtcgatgccaccatgatccggaaggttgaccagaatggaatcatctccaccctgctgggctccaatgacctcactgccgtccggccgctgagctgtgattccagcatggatgtagcccaggttcgtctggagtggccaacagaccttgctgtcaatcccatggataactccttgtatgttctagagaacaatgtcatccttcgaatcaccgagaaccaccaagtcagcatcattgcgggacgccccatgcactgccaagttcctggcattgactactcactcagcaaactagccattcactctgccctggagtcagccagtgccattgccatttctcacactggggtcctctacatcactgagacagatgagaagaagattaaccgtctacgccaggtaacaaccaacggggagatctgccttttagctggggcagcctcggactgcgactgcaaaaacgatgtcaattgcaactgctattcaggagatgatgcctacgcgactgatgccatcttgaattccccatcatccttagctgtagctccagatggtaccatttacattgcagaccttggaaatattcggatcagggcggtcagcaagaacaagcctgttcttaatgccttcaaccagtatgaggctgcatcccccggagagcaggagttatatgttttcaacgctgatggcatccaccaatacactgtgagcctggtgacaggggagtacttgtacaatttcacatatagtactgacaatgatgtcactgaattgattgacaataatgggaattccctgaagatccgtcgggacagcagtggcatgccccgtcacctgctcatgcctgacaaccagatcatcaccctcaccgtgggcaccaatggaggcctcaaagtcgtgtccacacagaacctggagcttggtctcatgacctatgatggcaacactgggctcctggccaccaagagcgatgaaacaggatggacgactttctatgactatgaccacgaaggccgcctgaccaacgtgacgcgccccacgggggtggtaaccagtctgcaccgggaaatggagaaatctattaccattgacattgagaactccaaccgtgatgatgacgtcactgtcatcaccaacctctcttcagtagaggcctcctacacagtggtacaagatcaagttcggaacagctaccagctctgtaataatggtaccctgagggtgatgtatgctaatgggatgggtatcagcttccacagcgagccccatgtcctagcgggcaccatcacccccaccattggacgctgcaacatctccctgcctatggagaatggcttaaactccattgagtggcgcctaagaaaggaacagattaaaggcaaagtcaccatctttggcaggaagctccgggtccatggaagaaatctcttgtccattgactatgatcgaaatattcggactgaaaagatctatgatgaccaccggaagttcaccctgaggatcatttatgaccaggtgggccgccccttcctctggctgcccagcagcgggctggcagctgtcaacgtgtcatacttcttcaatgggcgcctggctgggcttcagcgtggggccatgagcgagaggacagacatcgacaagcaaggccgcatcgtgtcccgcatgttcgctgacgggaaagtgtggagctactcctaccttgacaagtccatggtcctcctgcttcagagccaacgtcagtatatatttgagtatgactcctctgaccgcctccttgccgtcaccatgcccagcgtggcccggcacagcatgtccacacacacctccatcggctacatccgtaatatttacaacccgcctgaaagcaatgcttcggtcatctttgactacagtgatgacggccgcatcctgaagacctcctttttgggcaccggacgccaggtgttctacaagtatgggaaactctccaagttatcagagattgtctacgacagtaccgccgtcaccttcgggtatgacgagaccactggtgtcttgaagatggtcaacctccaaagtgggggcttctcctgcaccatcaggtaccggaagattggccccctggtggacaagcagatctacaggttctccgaggaaggcatggtcaatgccaggtttgactacacctatcatgacaacagcttccgcatcgcaagcatcaagcccgtcataagtgagactcccctccccgttgacctctaccgctatgatgagatttctggcaaggtggaacactttggtaagtttggagtcatctattatgacatcaaccagatcatcaccactgccgtgatgaccctcagcaaacacttcgacacccatgggcggatcaaggaggtccagtatgagatgttccggtccctcatgtactggatgacggtgcaatatgacagcatgggcagggtgatcaagagggagctaaaactggggccctatgccaataccacgaagtacacctatgactacgatggggacgggcagctccagagcgtggccgtcaatgaccgcccgacctggcgctacagctatgaccttaatgggaatctccacttactgaacccaggcaacagtgtgcgcctcatgcccttgcgctatgacctccgggatcggataaccagactcggggatgtgcagtacaaaattgacgacgatggctatctgtgccagagagggtctgacatcttcgaatacaattccaagggcctcctaacaagagcctacaacaaggccagcgggtggagtgtccagtaccgctatgatggcgtaggacggcgggcttcctacaagaccaacctgggccaccacctgcagtacttctactctgacctccacaacccgacgcgcatcacccatgtctacaatcactccaactcggagattacctcactgtactacgacctccagggccacctctttgccatggagagcagcagtggggaggagtactatgttgcctctgataacacagggactcctctggctgtgttcagcatcaacggcctcatgatcaaacagctgcagtacacggcctatggggagatttattatgactccaaccccgacttccagatggtcattggcttccatgggggactctatgaccccctgaccaagctggtccacttcactcagcgtgattatgatgtgctggcaggacgatggacctccccagactataccatgtggaaaaacgtgggcaaggagccggccccctttaacctgtatatgttcaagagcaacaatcctctcagcagtgagctagatttgaagaactacgtgacagatgtgaaaagctggcttgtgatgtttggatttcagcttagcaacatcattcctggcttcccgagagccaaaatgtatttcgtgcctcctccctatgaattgtcagagagtcaagcaagtgagaatggacagctcattacaggtgtccaacagacaacagagagacataaccaggccttcatggctctggaaggacaggtcattactaaaaagctccacgccagcatccgagagaaagcaggtcactggtttgccaccaccacgcccatcattggcaaaggcatcatgtttgccatcaaagaagggcgggtgaccacgggcgtgtccagcatcgccagcgaagatagccgcaaggtggcatctgtgctgaacaacgcctactacctggacaagatgcactacagcatcgagggcaaggacacccactactttgtgaagattggctcagccgatggcgacctggtcacactaggcaccaccatcggccgcaaggtgctagagagcggggtgaacgtgaccgtgtcccagcccacgctgctggtcaacggcaggactcgaaggttcacgaacattgagttccagtactccacgctgctgctcagcatccgctatggcctcacccccgacaccctggacgaagagaaggcccgcgtcctggaccaggcgagacagagggccctgggcacggcctgggccaaggagcagcagaaagccagggacgggagagaggggagccgcctgtggactgagggcgagaagcagcagcttctgagcaccgggcgcgtgcaagggtacgagggatattacgtgcttcccgtggagcaatacccagagcttgcagacagtagcagcaacatccagtttttaagacagaatgagatgggaaagaggtaacaaaataatctgctgccattccttgtctgaatggctcagcaggagtaactgttatctcctctcctaaggagatgaagacctaacaggggcactgcggctgggctgctttaggagaccaagtggcaagaaagctcacattttttgagttcaaatgctactgtccaagcgagaagtccctcatcctgaagtagactaaagcccggctgaaaattccgaggaaaacaaaacaaacgaatgaatgaacagacacacacaatgttccaagttcccctaaaatatgacccacttgttctgggtctacgcagaaaagagacgcaaagtgtccaaaaggaacaaaagaacaaaaacgaataagcaaagaagaaaacaaacaaaaacaaaacaaaacaaacacacggaccgataaacaaagaagcgaagataagaaagaaggcctcatatccaattacctcactcattcacatgtgagcgacacgcagacatccgcgagggccagcgtcaccagaccagctgcgggacaaaccactcagactgcttgtaggacaaatacttctgacattttcgtttaagcaaatacaggtgcatttaaaacacgactttgggggtgatttgtgtgtagcgcctggggaggggggataaaagaggaggagtgagcactggaaatactttttaaagaaaaaaaaacatgagggaataaaagaaattcctatcaaaaatcaaagtgaaataataccatccagcacttaactctcaggtcccaactaagtctggcctgagctaatttatttgagcgcagagtgtaaaatttaattcaaaatggtggctataatcactacagataaatttcatactcttttgtctttggagattccattgtggacagtaatacgcagttacagggtgtagtctgtttagattccgtagttcgtgggtatcagtttcggtagaggtgcagcatcgtgacacttttgctaacaggtaccacttctgatcaccctgtacatacatgagccgaaaggcacaatcactgtttcagatttaaaattattagtgtgtttgtttggtccagaaactgagacaatcacatgacagtcaccacgaggagagaaaatttaaaaaataaaaataaaaacaaaaaaaattttaaaaattaaaaaaacaaaaataaagtctaataagaactttggtacaggaacttttttgtaatatacatgtatgaattgttcatcgagtttttatattaattttaatttgctgctaagcaaagactagggacaggcaaagataatttatggcaaagtgtttaaattgtttatacatgaataaagtctctaaaactccaaaaaaaaaaaaaaaaaa

SEQ ID NO: 80 - protein, 2551 aa, Homo sapiens
MLHAANKGRKPSAEAGRPIPPTSSPSLLPSAQLPSSHNPPPVSCQMPLLDSNTSHQIMDTNPDEEFSPNSYLLRACSGPQQASSSGPPNHHSQSTLRPPLPPPHNHTLSHHHSSANSLNRNSLTNRRSQIHAPAPAPNDLATTPESVQLQDSWVLNSNVPLETRHFLFKTSSGSTPLFSSSSPGYPLTSGTVYTPPPRLLPRNTFSRKAFKLKKPSKYCSWKCAALSAIAAALLLAILLAYFIAMHLLGLNWQLQPADGHTFNNGIRTGLPGNDDVATMPSGGKVPWSLKNSSIDSGEAEVGRRVTQEVPPGVFWRSQIHISQPQFLKFNISLGKDALFGVYIRRGLPPSHAQYDFMERLDGKEKWSVVESPRERRSIQTLVQNEAVFVQYLDVGLWHLAFYNDGKDKEMVSFNTVVLDSVQDCPRNCHGNGECVSGVCHCFPGFLGADCAKAACPVLCSGNGQYSKGTCQCYSGWKGAECDVPMNQCIDPSCGGHGSCIDGNCVCSAGYKGEHCEEVDCLDPTCSSHGVCVNGECLCSPGWGGLNCELARVQCPDQCSGHGTYLPDTGLCSCDPNWMGPDCSVDGCPDLCNGNGRCTLGQNSWQCVCQTGWRGPGCNVAMETSCADNKDNEGDGLVDCLDPDCCLQSACQNSLLCRGSRDPLDIIQQGQTDWPAVKSFYDRIKLLAGKDSTHIIPGENPFNSSLVSLIRGQVVTTDGTPLVGVNVSFVKYPKYGYTITRQDGTFDLIANGGASLTLHFERAPFMSQERTVWLPWNSFYAMDTLVMKTEENSIPSCDLSGFVRPDPIIISSPLSTFFSAAPGQNPIVPETQVLHEEIELPGSNVKLRYLSSRTAGYKSLLKITMTQSTVPLNLIRVHLMVAVEGHLFQKSFQASPNLAYTFIWDKTDAYGQRVYGLSDAVVSVGFEYETCPSLILWEKRTALLQGFELDPSNLGGWSLDKHHILNVKSGILHKGTGENQFLTQQPAIITSIMGNGRRRSISCPSCNGLAEGNKLLAPVALAVGIDGSLYVGDFNYIRRIFPSRNVTSILELRNKEFKHSNNPAHKYYLAVDPVSGSLYVSDTNSRRIYRVKSLSGTKDLAGNSEVVAGTGEQCLPFDEARCGDGGKAIDATLMSPRGIAVDKNGLMYFVDATMIRKVDQNGIISTLLGSNDLTAVRPLSCDSSMDVAQVRLEWPTDLAVNPMDNSLYVLENNVILRITENHQVSIIAGRPMHCQVPGIDYSLSKLAIHSALESASAIAISHTGVLYITETDEKKINRLRQVTTNGEICLLAGAASDCDCKNDVNCNCYSGDDAYATDAILNSPSSLAVAPDGTIYIADLGNIRIRAVSKNKPVLNAFNQYEAASPGEQELYVFNADGIHQYTVSLVTGEYLYNFTYSTDNDVTELIDNNGNSLKIRRDSSGMPRHLLMPDNQIITLTVGTNGGLKVVSTQNLELGLMTYDGNTGLLATKSDETGWTTFYDYDHEGRLTNVTRPTGVVTSLHREMEKSITIDIENSNRDDDVTVITNLSSVEASYTVVQDQVRNSYQLCNNGTLRVMYANGMGISFHSEPHVLAGTITPTIGRCNISLPMENGLNSIEWRLRKEQIKGKVTIFGRKLRVHGRNLLSIDYDRNIRTEKIYDDHRKFTLRIIYDQVGRPFLWLPSSGLAAVNVSYFFNGRLAGLQRGAMSERTDIDKQGRIVSRMFADGKVWSYSYLDKSMVLLLQSQRQYIFEYDSSDRLLAVTMPSVARHSMSTHTSIGYIRNIYNPPESNASVIFDYSDDGRILKTSFLGTGRQVFYKYGKLSKLSEIVYDSTAVTFGYDETTGVLKMVNLQSGGFSCTIRYRKIGPLVDKQIYRFSEEGMVNARFDYTYHDNSFRIASIKPVISETPLPVDLYRYDEISGKVEHFGKFGVIYYDINQIITTAVMTLSKHFDTHGRIKEVQYEMFRSLMYWMTVQYDSMGRVIKRELKLGPYANTTKYTYDYDGDGQLQSVAVNDRPTWRYSYDLNGNLHLLNPGNSVRLMPLRYDLRDRITRLGDVQYKIDDDGYLCQRGSDIFEYNSKGLLTRAYNKASGWSVQYRYDGVGRRASYKTNLGHHLQYFYSDLHNPTRITHVYNHSNSEITSLYYDLQGHLFAMESSSGEEYYVASDNTGTPLAVFSINGLMIKQLQYTAYGEIYYDSNPDFQMVIGFHGGLYDPLTKLVHFTQRDYDVLAGRWTSPDYTMWKNVGKEPAPFNLYMFKSNNPLSSELDLKNYVTDVKSWLVMFGFQLSNIIPGFPRAKMYFVPPPYELSESQASENGQLITGVQQTTERHNQAFMALEGQVITKKLHASIREKAGHWFATTTPIIGKGIMFAIKEGRVTTGVSSIASEDSRKVASVLNNAYYLDKMHYSIEGKDTHYFVKIGSADGDLVTLGTTIGRKVLESGVNVTVSQPTLLVNGRTRRFTNIEFQYSTLLLSIRYGLTPDTLDEEKARVLDQARQRALGTAWAKEQQKARDGREGSRLWTEGEKQQLLSTGRVQGYEGYYVLPVEQYPELADSSSNIQFLRQNEMGKR

SEQ ID NO: 81 - DNA, 9695 bp, Homo sapiens
  CDS (435)..(8336)
gtaaccgtcagaattttgtaataacgactcactatagggcggccgcgaattcggcacgagtcgaagtgaaggaattttgctccaaagcgagctgggaccgaagactctaggctaagttatctatgtagatggtgtcagggagcgaagctactgaccgagctgctgacactggagacagaacagtgagcaacagagacaaatcctctcttctcctacagtttgcatcgcagtaagaaagaactaagttacatccagctttttaattgcctaagcggtctggggcttgcttcgtcatttggctttgctgtggagcactcctgtaaagccagctgaattgtacatcgaagatccacccttttggtggcaaagtgacaagtgccaaaactcaggcctgacttttctgaaaacatcagcattctgccatatctggaataatggatgtaaaggaccggcgacaccgctctttgaccagaggacgctgtggcaaagagtgtcgctacacaagctcctctctggacagtgaggactgccgcgtgcccacacagaaatcctacagctccagtgagactctgaaggcctatgaccatgacagcaggatgcactatggaaaccgagtcacagacctcatccaccgggagtcagatgagtttcctagacaaggaaccaacttcacccttgccgaactgggcatctgtgagccctccccacaccgaagcggctactgctccgacatggggatccttcaccagggctactcccttagcacagggtctgacgccgactccgacaccgagggagggatgtctccagaacacgccatcagactgtggggcagagggataaaatccaggcgcagttccggcctgtccagtcgtgaaaactcggcccttaccctgactgactctgacaacgaaaacaaatcagatgatgagaacggccctccgaaccaccacagccagtcgactctgaggccccctctcccaccccctcacaaccacacgctgtcccatcaccactcgtccgccaactccctcaacaggaactcactgaccaatcggcggagtcagatccacgccccggccccagcgcccaatgacctggccaccacaccagagtccgttcagcttcaggacagctgggtgctaaacagcaacgtgccactggagacccggcacttcctcttcaagacctcctcggggagcacacccttgttcagcagctcttccccgggataccctttgacctcaggaacggtttacacgcccccgccccgcctgctgcccaggaatactttctccaggaaggctttcaagctgaagaagccctccaaatactgcagctggaaatgtgctgccctctccgccattgccgcggccctcctcttggctattttgctggcgtatttcatagcaatgcatctgctcggactcaattggcaactccagcctgcagatgggcacacctttaacaatgggataaggaccggcttaccaggaaacgatgatgtggcaacaatgccatctggaggcaaagtgccctggtcgttgaaaaacagcagcatagacagtggtgaagcagaagttggtcggcgggtaacacaagaagtcccaccaggggtgttttggaggtcacaaattcacatcagtcagccccagttcttaaagttcaacatctccctcgggaaggacgctctctttggtgtttacataagaagaggacttccaccatctcatgcccagtatgacttcatggaacgtctggacgggaaggagaagtggagtgtggttgagtctcccagggaacgccggagcatacagaccttggttcagaatgaagccgtgtttgtgcagtacctggatgtgggcctgtggcatctggccttctacaatgatggaaaagacaaagagatggtttccttcaatactgttgtcctagattcagtgcaggactgtccacgtaactgccatgggaatggtgaatgtgtgtccggggtgtgtcactgtttcccaggatttctaggagcagactgtgctaaagctgcctgccctgtcctgtgcagtgggaatggacaatattctaaagggacgtgccagtgctacagcggctggaaaggtgcagagtgcgacgtgcccatgaatcagtgcatcgatccttcctgcgggggccacggctcctgcattgatgggaactgtgtctgctctgctggctacaaaggcgagcactgtgaggaagttgattgcttggatcccacctgctccagccacggagtctgtgtgaatggagaatgcctgtgcagccctggctggggtggtctgaactgtgagctggcgagggtccagtgcccagaccagtgcagtgggcatggcacgtacctgcctgacacgggcctctgcagctgcgatcccaactggatgggtcccgactgctctgttgatggctgccctgacttgtgcaacggtaacgggagatgcacactgggtcagaacagctggcagtgtgtctgccagaccggctggagagggcccggatgcaacgttgccatggaaacttcctgtgctgataacaaggataatgagggagatggcctggtggattgtttggaccctgactgctgcctgcagtcagcctgtcagaacagcctgctctgccgggggtcccgggacccactggacatcattcagcagggccagacggattggcccgcagtgaagtccttctatgaccgtatcaagctcttggcaggcaaggatagcacccacatcattcctggagagaaccctttcaacagcagcttggtttctctcatccgaggccaagtagtaactacagatggaactcccctggtcggtgtgaacgtgtcttttgtcaagtacccaaaatacggctacaccatcacccgccaggatggcacgttcgacctgatcgcaaatggaggtgcttccttgactctacactttgagcgagccccgttcatgagccaggagcgcactgtgtggctgccgtggaacagcttttacgccatggacaccctggtgatgaagaccgaggagaactccatccccagctgtgacctcagtggctttgtccggcctgatccaatcatcatctcctccccactgtccaccttctttagtgctgcccctgggcagaatcccatcgtgcctgagacccaggttcttcatgaagaaatcgagctccctggttccaatgtgaaacttcgctatctgagctctagaactgcagggtacaagtcactgctgaagatcaccatgacccagtccacagtgcccctgaacctcattagggttcacctgatggtggctgtcgaggggcatctcttccagaagtcattccaggcttctcccaacctggcctacaccttcatctgggacaagacagatgcgtatggccaaagggtgtatggactctcagatgctgttgtgtctgtcgggtttgaatatgagacctgtcccagtctaattctctgggagaaaaggacagccctccttcagggattcgagctggacccctccaacctcggtggctggtccctagacaaacaccacatcctcaatgttaaaagtggaatcctacacaaaggcactggggaaaaccagttcctgacccagcagcctgccatcatcaccagcatcatgggcaatggtcgccgccggagcatttcctgtcccagctgcaacggccttgctgaaggcaacaagctgctggccccagtggctctggctgttggaatcgatgggagcctctatgtgggtgacttcaattacatccgacgcatctttccctctcgaaatgtgaccagcatcttggagttacgaaataaagagtttaaacatagcaacaacccagcacacaagtactacttggcagtggaccccgtgtccggctcgctctacgtgtccgacaccaacagcaggagaatctaccgcgtcaagtctctgagtggaaccaaagacctggctgggaattcggaagttgtggcagggacgggagagcagtgtctaccctttgatgaagcccgctgcggggatggagggaaggccatagatgcaaccctgatgagcccgagaggtattgcagtagacaagaatgggctcatgtactttgtcgatgccaccatgatccggaaggttgaccagaatggaatcatctccaccctgctgggctccaatgacctcactgccgtccggccgctgagctgtgattccagcatggatgtagcccaggttcgtctggagtggccaacagaccttgctgtcaatcccatggataactccttgtatgttctagagaacaatgtcatccttcgaatcaccgagaaccaccaagtcagcatcattgcgggacgccccatgcactgccaagttcctggcattgactactcactcagcaaactagccattcactctgccctggagtcagccagtgccattgccatttctcacactggggtcctctacatcactgagacagatgagaagaagattaaccgtctacgccaggtaacaaccaacggggagatctgccttttagctggggcagcctcggactgcgactgcaaaaacgatgtcaattgcaactgctattcaggagatgatgcctacgcgactgatgccatcttgaattccccatcatccttagctgtagctccagatggtaccatttacattgcagaccttggaaatattcggatcagggcggtcagcaagaacaagcctgttcttaatgccttcaaccagtatgaggctgcatcccccggagagcaggagttatatgttttcaacgctgatggcatccaccaatacactgtgagcctggtgacaggggagtacttgtacaatttcacatatagtactgacaatgatgtcactgaattgattgacaataatgggaattccctgaagatccgtcgggacagcagtggcatgccccgtcacctgctcatgcctgacaaccagatcatcaccctcaccgtgggcaccaatggaggcctcaaagtcgtgtccacacagaacctggagcttggtctcatgacctatgatggcaacactgggctcctggccaccaagagcgatgaaacaggatggacgactttctatgactatgaccacgaaggccgcctgaccaacgtgacgcgccccacgggggtggtaaccagtctgcaccgggaaatggagaaatctattaccattgacattgagaactccaaccgtgatgatgacgtcactgtcatcaccaacctctcttcagtagaggcctcctacacagtggtacaagatcaagttcggaacagctaccagctctgtaataatggtaccctgagggtgatgtatgctaatgggatgggtatcagcttccacagcgagccccatgtcctagcgggcaccatcacccccaccattggacgctgcaacatctccctgcctatggagaatggcttaaactccattgagtggcgcctaagaaaggaacagattaaaggcaaagtcaccatctttggcaggaagctccgggtccatggaagaaatctcttgtccattgactatgatcgaaatattcggactgaaaagatctatgatgaccaccggaagttcaccctgaggatcatttatgaccaggtgggccgccccttcctctggctgcccagcagcgggctggcagctgtcaacgtgtcatacttcttcaatgggcgcctggctgggcttcagcgtggggccatgagcgagaggacagacatcgacaagcaaggccgcatcgtgtcccgcatgttcgctgacgggaaagtgtggagctactcctaccttgacaagtccatggtcctcctgcttcagagccaacgtcagtatatatttgagtatgactcctctgaccgcctccttgccgtcaccatgcccagcgtggcccggcacagcatgtccacacacacctccatcggctacatccgtaatatttacaacccgcctgaaagcaatgcttcggtcatctttgactacagtgatgacggccgcatcctgaagacctcctttttgggcaccggacgccaggtgttctacaagtatgggaaactctccaagttatcagagattgtctacgacagtaccgccgtcaccttcgggtatgacgagaccactggtgtcttgaagatggtcaacctccaaagtgggggcttctcctgcaccatcaggtaccggaagattggccccctggtggacaagcagatctacaggttctccgaggaaggcatggtcaatgccaggtttgactacacctatcatgacaacagcttccgcatcgcaagcatcaagcccgtcataagtgagactcccctccccgttgacctctaccgctatgatgagatttctggcaaggtggaacactttggtaagtttggagtcatctattatgacatcaaccagatcatcaccactgccgtgatgaccctcagcaaacacttcgacacccatgggcggatcaaggaggtccagtatgagatgttccggtccctcatgtactggatgacggtgcaatatgacagcatgggcagggtgatcaagagggagctaaaactggggccctatgccaataccacgaagtacacctatgactacgatggggacgggcagctccagagcgtggccgtcaatgaccgcccgacctggcgctacagctatgaccttaatgggaatctccacttactgaacccaggcaacagtgtgcgcctcatgcccttgcgctatgacctccgggatcggataaccagactcggggatgtgcagtacaaaattgacgacgatggctatctgtgccagagagggtctgacatcttcgaatacaattccaagggcctcctaacaagagcctacaacaaggccagcgggtggagtgtccagtaccgctatgatggcgtaggacggcgggcttcctacaagaccaacctgggccaccacctgcagtacttctactctgacctccacaacccgacgcgcatcacccatgtctacaatcactccaactcggagattacctcactgtactacgacctccagggccacctctttgccatggagagcagcagtggggaggagtactatgttgcctctgataacacagggactcctctggctgtgttcagcatcaacggcctcatgatcaaacagctgcagtacacggcctatggggagatttattatgactccaaccccgacttccagatggtcattggcttccatgggggactctatgaccccctgaccaagctggtccacttcactcagcgtgattatgatgtgctggcaggacgatggacctccccagactataccatgtggaaaaacgtgggcaaggagccggccccctttaacctgtatatgttcaagagcaacaatcctctcagcagtgagctagatttgaagaactacgtgacagatgtgaaaagctggcttgtgatgtttggatttcagcttagcaacatcattcctggcttcccgagagccaaaatgtatttcgtgcctcctccctatgaattgtcagagagtcaagcaagtgagaatggacagctcattacaggtgtccaacagacaacagagagacataaccaggccttcatggctctggaaggacaggtcattactaaaaagctccacgccagcatccgagagaaagcaggtcactggtttgccaccaccacgcccatcattggcaaaggcatcatgtttgccatcaaagaagggcgggtgaccacgggcgtgtccagcatcgccagcgaagatagccgcaaggtggcatctgtgctgaacaacgcctactacctggacaagatgcactacagcatcgagggcaaggacacccactactttgtgaagattggctcagccgatggcgacctggtcacactaggcaccaccatcggccgcaaggtgctagagagcggggtgaacgtgaccgtgtcccagcccacgctgctggtcaacggcaggactcgaaggttcacgaacattgagttccagtactccacgctgctgctcagcatccgctatggcctcacccccgacaccctggacgaagagaaggcccgcgtcctggaccaggcgagacagagggccctgggcacggcctgggccaaggagcagcagaaagccagggacgggagagaggggagccgcctgtggactgagggcgagaagcagcagcttctgagcaccgggcgcgtgcaagggtacgagggatattacgtgcttcccgtggagcaatacccagagcttgcagacagtagcagcaacatccagtttttaagacagaatgagatgggaaagaggtaacaaaataatctgctgccattccttgtctgaatggctcagcaggagtaactgttatctcctctcctaaggagatgaagacctaacaggggcactgcggctgggctgctttaggagaccaagtggcaagaaagctcacattttttgagttcaaatgctactgtccaagcgagaagtccctcatcctgaagtagactaaagcccggctgaaaattccgaggaaaacaaaacaaacgaatgaatgaacagacacacacaatgttccaagttcccctaaaatatgacccacttgttctgggtctacgcagaaaagagacgcaaagtgtccaaaaggaacaaaagaacaaaaacgaataagcaaagaagaaaacaaacaaaaacaaaacaaaacaaacacacggaccgataaacaaagaagcgaagataagaaagaaggcctcatatccaattacctcactcattcacatgtgagcgacacgcagacatccgcgagggccagcgtcaccagaccagctgcgggacaaaccactcagactgcttgtaggacaaatacttctgacattttcgtttaagcaaatacaggtgcatttaaaacacgactttgggggtgatttgtgtgtagcgcctggggaggggggataaaagaggaggagtgagcactggaaatactttttaaagaaaaaaaaacatgagggaataaaagaaattcctatcaaaaatcaaagtgaaataataccatccagcacttaactctcaggtcccaactaagtctggcctgagctaatttatttgagcgcagagtgtaaaatttaattcaaaatggtggctataatcactacagataaatttcatactcttttgtctttggagattccattgtggacagtaatacgcagttacagggtgtagtctgtttagattccgtagttcgtgggtatcagtttcggtagaggtgcagcatcgtgacacttttgctaacaggtaccacttctgatcaccctgtacatacatgagccgaaaggcacaatcactgtttcagatttaaaattattagtgtgtttgtttggtccagaaactgagacaatcacatgacagtcaccacgaggagagaaaatttaaaaaataaaaataaaaacaaaaaaaattttaaaaattaaaaaaacaaaaataaagtctaataagaactttggtacaggaacttttttgtaatatacatgtatgaattgttcatcgagtttttatattaattttaatttgctgctaagcaaagactagggacaggcaaagataatttatggcaaagtgtttaaattgtttatacatgaataaagtctctaaaactccaaaaaaaaaaaaaaaaaa

SEQ ID NO: 82 - protein, 2633 aa, Homo sapiens
MDVKDRRHRSLTRGRCGKECRYTSSSLDSEDCRVPTQKSYSSSETLKAYDHDSRMHYGNRVTDLIHRESDEFPRQGTNFTLAELGICEPSPHRSGYCSDMGILHQGYSLSTGSDADSDTEGGMSPEHAIRLWGRGIKSRRSSGLSSRENSALTLTDSDNENKSDDENGPPNHHSQSTLRPPLPPPHNHTLSHHHSSANSLNRNSLTNRRSQIHAPAPAPNDLATTPESVQLQDSWVLNSNVPLETRHFLFKTSSGSTPLFSSSSPGYPLTSGTVYTPPPRLLPRNTFSRKAFKLKKPSKYCSWKCAALSAIAAALLLAILLAYFIAMHLLGLNWQLQPADGHTFNNGIRTGLPGNDDVATMPSGGKVPWSLKNSSIDSGEAEVGRRVTQEVPPGVFWRSQIHISQPQFLKFNISLGKDALFGVYIRRGLPPSHAQYDFMERLDGKEKWSVVESPRERRSIQTLVQNEAVFVQYLDVGLWHLAFYNDGKDKEMVSFNTVVLDSVQDCPRNCHGNGECVSGVCHCFPGFLGADCAKAACPVLCSGNGQYSKGTCQCYSGWKGAECDVPMNQCIDPSCGGHGSCIDGNCVCSAGYKGEHCEEVDCLDPTCSSHGVCVNGECLCSPGWGGLNCELARVQCPDQCSGHGTYLPDTGLCSCDPNWMGPDCSVDGCPDLCNGNGRCTLGQNSWQCVCQTGWRGPGCNVAMETSCADNKDNEGDGLVDCLDPDCCLQSACQNSLLCRGSRDPLDIIQQGQTDWPAVKSFYDRIKLLAGKDSTHIIPGENPFNSSLVSLIRGQVVTTDGTPLVGVNVSFVKYPKYGYTITRQDGTFDLIANGGASLTLHFERAPFMSQERTVWLPWNSFYAMDTLVMKTEENSIPSCDLSGFVRPDPIIISSPLSTFFSAAPGQNPIVPETQVLHEEIELPGSNVKLRYLSSRTAGYKSLLKITMTQSTVPLNLIRVHLMVAVEGHLFQKSFQASPNLAYTFIWDKTDAYGQRVYGLSDAVVSVGFEYETCPSLILWEKRTALLQGFELDPSNLGGWSLDKHHILNVKSGILHKGTGENQFLTQQPAIITSIMGNGRRRSISCPSCNGLAEGNKLLAPVALAVGIDGSLYVGDFNYIRRIFPSRNVTSILELRNKEFKHSNNPAHKYYLAVDPVSGSLYVSDTNSRRIYRVKSLSGTKDLAGNSEVVAGTGEQCLPFDEARCGDGGKAIDATLMSPRGIAVDKNGLMYFVDATMIRKVDQNGIISTLLGSNDLTAVRPLSCDSSMDVAQVRLEWPTDLAVNPMDNSLYVLENNVILRITENHQVSIIAGRPMHCQVPGIDYSLSKLAIHSALESASAIAISHTGVLYITETDEKKINRLRQVTTNGEICLLAGAASDCDCKNDVNCNCYSGDDAYATDAILNSPSSLAVAPDGTIYIADLGNIRIRAVSKNKPVLNAFNQYEAASPGEQELYVFNADGIHQYTVSLVTGEYLYNFTYSTDNDVTELIDNNGNSLKIRRDSSGMPRHLLMPDNQIITLTVGTNGGLKVVSTQNLELGLMTYDGNTGLLATKSDETGWTTFYDYDHEGRLTNVTRPTGVVTSLHREMEKSITIDIENSNRDDDVTVITNLSSVEASYTVVQDQVRNSYQLCNNGTLRVMYANGMGISFHSEPHVLAGTITPTIGRCNISLPMENGLNSIEWRLRKEQIKGKVTIFGRKLRVHGRNLLSIDYDRNIRTEKIYDDHRKFTLRIIYDQVGRPFLWLPSSGLAAVNVSYFFNGRLAGLQRGAMSERTDIDKQGRIVSRMFADGKVWSYSYLDKSMVLLLQSQRQYIFEYDSSDRLLAVTMPSVARHSMSTHTSIGYIRNIYNPPESNASVIFDYSDDGRILKTSFLGTGRQVFYKYGKLSKLSEIVYDSTAVTFGYDETTGVLKMVNLQSGGFSCTIRYRKIGPLVDKQIYRFSEEGMVNARFDYTYHDNSFRIASIKPVISETPLPVDLYRYDEISGKVEHFGKFGVIYYDINQIITTAVMTLSKHFDTHGRIKEVQYEMFRSLMYWMTVQYDSMGRVIKRELKLGPYANTTKYTYDYDGDGQLQSVAVNDRPTWRYSYDLNGNLHLLNPGNSVRLMPLRYDLRDRITRLGDVQYKIDDDGYLCQRGSDIFEYNSKGLLTRAYNKASGWSVQYRYDGVGRRASYKTNLGHHLQYFYSDLHNPTRITHVYNHSNSEITSLYYDLQGHLFAMESSSGEEYYVASDNTGTPLAVFSINGLMIKQLQYTAYGEIYYDSNPDFQMVIGFHGGLYDPLTKLVHFTQRDYDVLAGRWTSPDYTMWKNVGKEPAPFNLYMFKSNNPLSSELDLKNYVTDVKSWLVMFGFQLSNIIPGFPRAKMYFVPPPYELSESQASENGQLITGVQQTTERHNQAFMALEGQVITKKLHASIREKAGHWFATTTPIIGKGIMFAIKEGRVTTGVSSIASEDSRKVASVLNNAYYLDKMHYSIEGKDTHYFVKIGSADGDLVTLGTTIGRKVLESGVNVTVSQPTLLVNGRTRRFTNIEFQYSTLLLSIRYGLTPDTLDEEKARVLDQARQRALGTAWAKEQQKARDGREGSRLWTEGEKQQLLSTGRVQGYEGYYVLPVEQYPELADSSSNIQFLRQNEMGKR

SEQ ID NO: 83 - DNA, 4248 bp, Homo sapiens
  CDS (189)..(2720)
aagacctccatcagctcgccgcgcagcgcggctgtatttgcggcctgtgcgagtaggcgcttgggcactcagtctccctggcgagcgacgggcagaaatctcgaaccagtggagcgcactcgtaacctggatcccagaaggtcgcgaaggcagtaccgtttcctcagcggcggactgctgcagtaagaatgtcttttccacctcatttgaatcgccctcccatgggaatcccagcactcccaccagggatcccacccccgcagtttccaggatttcctccacctgtacctccagggaccccaatgattcctgtaccaatgagcattatggctcctgctccaactgtcttagtacccactgtgtctatggttggaaagcatttgggcgcaagaaaggatcatccaggcttaaaggctaaagaaaatgatgaaaattgtggtcctactaccactgtttttgttggcaacatttccgagaaagcttcagacatgcttataagacaactcttagctaaatgtggtttggttttgagctggaagagagtacaaggtgcttccggaaagcttcaagccttcggattctgtgagtacaaggagccagaatctaccctccgtgcactcagattattacatgacctgcaaattggagagaaaaagctactcgttaaagttgatgcaaagacaaaggcacagctggatgaatggaaagcaaagaagaaagcttctaatgggaatgcaaggccagaaactgtcactaatgacgatgaagaagccttggatgaagaaacaaagaggagagatcagatgattaaaggggctattgaagttttaattcgtgaatactccagtgagctaaatgccccctcacaggaatctgattctcaccccaggaagaagaagaaggaaaagaaggaggacattttccgcagatttccagtggccccactgatcccttatccactcatcactaaggaggatataaatgctatagaaatggaagaagacaaaagagacctgatatctcgagagatcagcaaattcagagacacacataagaaactggaagaagagaaaggcaaaaaggaaaaagaaagacaggaaattgagaaagaacggagagaaagagagagggagcgtgaaagggaacgagaaaggcgagaacgggaacgagaaagggaaagagaacgtgaacgagaaaaggagaaagaacgggagcgggaacgagaacgggatagggaccgtgaccggacaaaagagagagaccgagatcgggatcgagagagagatcgtgaccgggatagagaaaggagctcagatcgtaataaggatcgcagtcgatcaagagaaaaaagcagagatcgtgaaagggaacgagagcgggaaagagagagagagagagaacgagagcgagaacgagaacgggagcgagagagagagcgagagagggaacgggagcgagaaagagaaaaagacaaaaaacgggaccgagaagaagatgaagaagatgcatacgaacgaagaaaacttgaaagaaaactccgagagaaagaagctgcttatcaagagcgccttaagaattgggaaatcagagaacgaaagaaaacccgggaatatgagaaagaagctgaaagagaagaagaaagaagaagagaaatggccaaagaagctaaacgactaaaagaattcttagaagactatgatgatgatagagatgaccccaaatattacagaggaagtgctcttcagaaaaggttgcgtgatagagaaaaggaaatggaagcagatgaacgagataggaagagagagaaggaggagcttgaggaaatcaggcagcgccttctggcagaagggcatccagatccagatgcagagctccagaggatggaacaagaggctgagaggcgcaggcagccacaaataaagcaagagccagaatcagaagaggaggaagaagaaaagcaagaaaaagaagaaaaacgagaagaacccatggaagaggaagaggagccagagcaaaagccttgtctgaaacctactctgaggcccatcagctctgctccatctgtttcctctgccagtggcaatgcaacacctaacactcctggggatgagtctccctgtggtattattattcctcatgaaaactcaccagatcaacagcaacctgaggagcataggccaaaaataggactaagtcttaaactgggtgcttccaatagtcctggtcagcctaattctgtgaagagaaagaaactacctgtagatagtgtctttaacaaatttgaggatgaagacagtgatgacgtaccccgaaaaaggaaactggttcccttggattatggtgaagatgataaaaatgcaaccaaaggcactgtaaacactgaagaaaagcgtaaacacattaagagtctcattgagaaaatccctacagccaaacctgagctcttcgcttatcccctggattggtctattgtggattctatactgatggaacgtcgaattagaccatggattaataagaaaatcatagaatatataggtgaagaagaagctacattagttgattttgtttgttctaaggttatggctcatagttcaccccagagcattttagatgatgttgccatggtacttgatgaagaagcagaagtttttatagtcaaaatgtggagattattgatatatgaaacagaagccaagaaaattggtcttgtgaagtaaaactttttatatttagagttccatttcagatttcttctttgccacccttttaaggactttgaatttttctttgtctttgaagacattgtgagatctgtaattttttttttttgtagaaaatgtgaattttttggtcctctaatttgttgttgccctgtgtactcccttggttgtaaagtcatctgaatccttggttctctttatactcaccaggtacaaattactggtatgttttataagccgcagctactgtacacagcctatctgatataatcttgttctgctgatttgtttcttgtaaatattaaaacgactccccaattattttgcagaattgcacttaatattgaaatgtactgtataggaaccaacatgaacaattttaattgaaaacaccagtcataaactattaccacccccactctcttttgatcagaaatggcaagcccttgtgaaggcatggagtttaaaattggaatgcaaaaattagcagacaatccattcctactgtatttctgtatgaatgtgtttgtgaatgtatgtgtaaaagtctttcttttccctaatttgctttggtggggtccttaaaacatttcccaactaaagaatagaattgtaaaggaaaagtggtactgttccaacctgaaatgtctgttataattaggttattagtttcccagagcatggtgttctcgtgtcgtgagcaatgtggtttgctaactggatggggttttcttattaataagatggctgcttcagcttctcttttaaaggaatgtggatcatagtgatttttccttttaattttattgctcagaaatgaggcatatcctaaaaatcctggagagctgtatttaatgcatttttgcactaattggtccttagtttaattctattgtatctgtttatttaacaaaaaattcatcataccaaaaagtgtaagtgaaaaccccctttaaaacaaaacaaaaaaatgaaataaaattaggcaaattgacagacagtgagagttttacaaacatgataggtattctgctcggcaatttgtaagtttacatgttatttaaggataaaggtaaatcattcaaggcagttaccaaccactaactatttgttttcatttttgtcttgtagaaggtttatatcttgttttaccttggctcattagtgtttaaaaatgtactgatgatgtgcttagagaaattcctggggctttcttcgttgtagatcagaatttcaccagggagtaaaattacctgaaaacgtaagaagttttaaacagcttttcacacaaattagatgcaactgttcccatgtctgagtacttatttaaaagaaaggtaaagattggcctgttagaaaaagcataatgtgagctttggattactggattttttttttttttaaacacacctggagaggacatttgaaaacactgttcttaccctcgaaccctgatgtggttccattatgtaaatatttcaaatattaaaaatgtatatatttgaaaaaaaaaaaaaaaaaaaaa

SEQ ID NO: 84 - protein, 843 aa, Homo sapiens
MSFPPHLNRPPMGIPALPPGIPPPQFPGFPPPVPPGTPMIPVPMSIMAPAPTVLVPTVSMVGKHLGARKDHPGLKAKENDENCGPTTTVFVGNISEKASDMLIRQLLAKCGLVLSWKRVQGASGKLQAFGFCEYKEPESTLRALRLLHDLQIGEKKLLVKVDAKTKAQLDEWKAKKKASNGNARPETVTNDDEEALDEETKRRDQMIKGAIEVLIREYSSELNAPSQESDSHPRKKKKEKKEDIFRRFPVAPLIPYPLITKEDINAIEMEEDKRDLISREISKFRDTHKKLEEEKGKKEKERQEIEKERRERERERERERERREREREREREREREKEKERERERERDRDRDRTKERDRDRDRERDRDRDRERSSDRNKDRSRSREKSRDREREREREREREREREREREREREREREREREREREKDKKRDREEDEEDAYERRKLERKLREKEAAYQERLKNWEIRERKKTREYEKEAEREEERRREMAKEAKRLKEFLEDYDDDRDDPKYYRGSALQKRLRDREKEMEADERDRKREKEELEEIRQRLLAEGHPDPDAELQRMEQEAERRRQPQIKQEPESEEEEEEKQEKEEKREEPMEEEEEPEQKPCLKPTLRPISSAPSVSSASGNATPNTPGDESPCGIIIPHENSPDQQQPEEHRPKIGLSLKLGASNSPGQPNSVKRKKLPVDSVFNKFEDEDSDDVPRKRKLVPLDYGEDDKNATKGTVNTEEKRKHIKSLIEKIPTAKPELFAYPLDWSIVDSILMERRIRPWINKKIIEYIGEEEATLVDFVCSKVMAHSSPQSILDDVAMVLDEEAEVFIVKMWRLLIYETEAKKIGLVK

SEQ ID NO: 85 - DNA, 4056 bp, Homo sapiens
  CDS (189)..(2528)
aagacctccatcagctcgccgcgcagcgcggctgtatttgcggcctgtgcgagtaggcgcttgggcactcagtctccctggcgagcgacgggcagaaatctcgaaccagtggagcgcactcgtaacctggatcccagaaggtcgcgaaggcagtaccgtttcctcagcggcggactgctgcagtaagaatgtcttttccacctcatttgaatcgccctcccatgggaatcccagcactcccaccagggatcccacccccgcagtttccaggatttcctccacctgtacctccagggaccccaatgattcctgtaccaatgagcattatggctcctgctccaactgtcttagtacccactgtgtctatggttggaaagcatttgggcgcaagaaaggatcatccaggcttaaaggctaaagaaaatgatgaaaattgtggtcctactaccactgtttttgttggcaacatttccgagaaagcttcagacatgcttataagacaactcttagctaaatgtggtttggttttgagctggaagagagtacaaggtgcttccggaaagcttcaagccttcggattctgtgagtacaaggagccagaatctaccctccgtgcactcagattattacatgacctgcaaattggagagaaaaagctactcgttaaagttgatgcaaagacaaaggcacagctggatgaatggaaagcaaagaagaaagcttctaatgggaatgcaaggccagaaactgtcactaatgacgatgaagaagccttggatgaagaaacaaagaggagagatcagatgattaaaggggctattgaagttttaattcgtgaatactccagtgagctaaatgccccctcacaggaatctgattctcaccccaggaagaagaagaaggaaaagaaggaggacattttccgcagatttccagtggccccactgatcccttatccactcatcactaaggaggatataaatgctatagaaatggaagaagacaaaagagacctgatatctcgagagatcagcaaattcagagacacacataagaaactggaagaagagaaaggcaaaaaggaaaaagaaagacaggaaattgagaaagaacggagagaaagagagagggagcgtgaaagggaacgagaaaggcgagaacgggaacgagaaagggaacgagagcgggaaagagagagagagagagaacgagagcgagaacgagaacgggagcgagagagagagcgagagagggaacgggagcgagaaagagaaaaagacaaaaaacgggaccgagaagaagatgaagaagatgcatacgaacgaagaaaacttgaaagaaaactccgagagaaagaagctgcttatcaagagcgccttaagaattgggaaatcagagaacgaaagaaaacccgggaatatgagaaagaagctgaaagagaagaagaaagaagaagagaaatggccaaagaagctaaacgactaaaagaattcttagaagactatgatgatgatagagatgaccccaaatattacagaggaagtgctcttcagaaaaggttgcgtgatagagaaaaggaaatggaagcagatgaacgagataggaagagagagaaggaggagcttgaggaaatcaggcagcgccttctggcagaagggcatccagatccagatgcagagctccagaggatggaacaagaggctgagaggcgcaggcagccacaaataaagcaagagccagaatcagaagaggaggaagaagaaaagcaagaaaaagaagaaaaacgagaagaacccatggaagaggaagaggagccagagcaaaagccttgtctgaaacctactctgaggcccatcagctctgctccatctgtttcctctgccagtggcaatgcaacacctaacactcctggggatgagtctccctgtggtattattattcctcatgaaaactcaccagatcaacagcaacctgaggagcataggccaaaaataggactaagtcttaaactgggtgcttccaatagtcctggtcagcctaattctgtgaagagaaagaaactacctgtagatagtgtctttaacaaatttgaggatgaagacagtgatgacgtaccccgaaaaaggaaactggttcccttggattatggtgaagatgataaaaatgcaaccaaaggcactgtaaacactgaagaaaagcgtaaacacattaagagtctcattgagaaaatccctacagccaaacctgagctcttcgcttatcccctggattggtctattgtggattctatactgatggaacgtcgaattagaccatggattaataagaaaatcatagaatatataggtgaagaagaagctacattagttgattttgtttgttctaaggttatggctcatagttcaccccagagcattttagatgatgttgccatggtacttgatgaagaagcagaagtttttatagtcaaaatgtggagattattgatatatgaaacagaagccaagaaaattggtcttgtgaagtaaaactttttatatttagagttccatttcagatttcttctttgccacccttttaaggactttgaatttttctttgtctttgaagacattgtgagatctgtaattttttttttttgtagaaaatgtgaattttttggtcctctaatttgttgttgccctgtgtactcccttggttgtaaagtcatctgaatccttggttctctttatactcaccaggtacaaattactggtatgttttataagccgcagctactgtacacagcctatctgatataatcttgttctgctgatttgtttcttgtaaatattaaaacgactccccaattattttgcagaattgcacttaatattgaaatgtactgtataggaaccaacatgaacaattttaattgaaaacaccagtcataaactattaccacccccactctcttttgatcagaaatggcaagcccttgtgaaggcatggagtttaaaattggaatgcaaaaattagcagacaatccattcctactgtatttctgtatgaatgtgtttgtgaatgtatgtgtaaaagtctttcttttccctaatttgctttggtggggtccttaaaacatttcccaactaaagaatagaattgtaaaggaaaagtggtactgttccaacctgaaatgtctgttataattaggttattagtttcccagagcatggtgttctcgtgtcgtgagcaatgtggtttgctaactggatggggttttcttattaataagatggctgcttcagcttctcttttaaaggaatgtggatcatagtgatttttccttttaattttattgctcagaaatgaggcatatcctaaaaatcctggagagctgtatttaatgcatttttgcactaattggtccttagtttaattctattgtatctgtttatttaacaaaaaattcatcataccaaaaagtgtaagtgaaaaccccctttaaaacaaaacaaaaaaatgaaataaaattaggcaaattgacagacagtgagagttttacaaacatgataggtattctgctcggcaatttgtaagtttacatgttatttaaggataaaggtaaatcattcaaggcagttaccaaccactaactatttgttttcatttttgtcttgtagaaggtttatatcttgttttaccttggctcattagtgtttaaaaatgtactgatgatgtgcttagagaaattcctggggctttcttcgttgtagatcagaatttcaccagggagtaaaattacctgaaaacgtaagaagttttaaacagcttttcacacaaattagatgcaactgttcccatgtctgagtacttatttaaaagaaaggtaaagattggcctgttagaaaaagcataatgtgagctttggattactggattttttttttttttaaacacacctggagaggacatttgaaaacactgttcttaccctcgaaccctgatgtggttccattatgtaaatatttcaaatattaaaaatgtatatatttgaaaaaaaaaaaaaaaaaaaaa

SEQ ID NO: 86 - protein, 779 aa, Homo sapiens
MSFPPHLNRPPMGIPALPPGIPPPQFPGFPPPVPPGTPMIPVPMSIMAPAPTVLVPTVSMVGKHLGARKDHPGLKAKENDENCGPTTTVFVGNISEKASDMLIRQLLAKCGLVLSWKRVQGASGKLQAFGFCEYKEPESTLRALRLLHDLQIGEKKLLVKVDAKTKAQLDEWKAKKKASNGNARPETVTNDDEEALDEETKRRDQMIKGAIEVLIREYSSELNAPSQESDSHPRKKKKEKKEDIFRRFPVAPLIPYPLITKEDINAIEMEEDKRDLISREISKFRDTHKKLEEEKGKKEKERQEIEKERRERERERERERERREREREREREREREREREREREREREREREREREREREREKDKKRDREEDEEDAYERRKLERKLREKEAAYQERLKNWEIRERKKTREYEKEAEREEERRREMAKEAKRLKEFLEDYDDDRDDPKYYRGSALQKRLRDREKEMEADERDRKREKEELEEIRQRLLAEGHPDPDAELQRMEQEAERRRQPQIKQEPESEEEEEEKQEKEEKREEPMEEEEEPEQKPCLKPTLRPISSAPSVSSASGNATPNTPGDESPCGIIIPHENSPDQQQPEEHRPKIGLSLKLGASNSPGQPNSVKRKKLPVDSVFNKFEDEDSDDVPRKRKLVPLDYGEDDKNATKGTVNTEEKRKHIKSLIEKIPTAKPELFAYPLDWSIVDSILMERRIRPWINKKIIEYIGEEEATLVDFVCSKVMAHSSPQSILDDVAMVLDEEAEVFIVKMWRLLIYETEAKKIGLVK

SEQ ID NO: 87 - DNA, 5866 bp, Homo sapiens
  CDS (1)..(5721)
atgattaagagggactgtgggtatcctggtctccgcgtgtgtgagtaccgcggcgcgaggttagtggtagctgggtgcagacgccgtggcgctggagacccaaacatggcaaacctggaagaaagcttcccccgaggaggtacaagaaagatccacaaaccagagaaagctttccagcagtcagttgaacaagacaacttatttgatatttctactgaagagggatccaccaaaagaaaaaagagccagaaggggccagcaaaaacaaaaaagttgaaaatcgaaaagagagaaagcagcaagtccgcaagagagaagtttgaaatccttagtgttgagtccctgtgtgagggaatgcgtattttgggttgcgtgaaagaggtgaatgaactggaactggtgattagtctccccaatggcctccagggctttgtgcaagtcactgaaatctgtgatgcctacaccaaaaagctgaatgagcaggtgacacaagaacaacctctgaaggacctacttcacttgcctgaacttttctcacctggaatgctggtaagatgtgtggtgagcagtctgggcatcacagacaggggcaagaagagtgtcaagctgtctctgaaccccaaaaatgtcaacagagtgctgagtgctgaggccctgaagcctggcatgctacttacaggtaccgtatccagcctggaagaccatggctacctagtggacattggtgttgatgggaccagagcttttctgccactgctgaaagcccaggagtacatcagacagaagaacaaaggtgctaaactaaaggtgggtcagtacctgaactgcattgttgaaaaggtgaaaggcaacggaggagttgttagtctgtctgttggtcactcagaggtttctacggccattgctactgaacagcagagctggaaccttaataacttgctaccaggactggtggtcaaagctcaggtacagaaggtgactccatttggccttacgctaaacttcctcacattcttcacgggcgtggttgactttatgcacctggatcccaagaaagctggaacatatttctcaaatcaggcagtgagggcctgcatcctttgcgtccatcctcgaaccagagttgtgcacctgagcctgcgccccatcttcctacagcctggacgcccactcacccgactctcttgccagaaccttggagcagtgctggatgatgttcctgtccagggttttttcaaaaaggctggggccacctttaggctgaaggatggggttctggcctatgcccggctcagccatctctctgattctaagaacgtcttcaatcctgaggccttcaagccagggaacactcacaagtgtagaattattgactacagccaaatggatgaactggccttgctctctctacgaacgtctattattgaagctcagtaccttagatatcatgacatcgaacctggggcagtggtaaagggcacagtgctaaccataaagtcatatgggatgctggtgaaggtgggcgagcagatgaggggcctggtacctcccatgcacctggctgacatcctgatgaagaatccggagaagaagtaccacatcggggatgaggtcaagtgccgggttttgctttgtgaccctgaagccaagaagctgatgatgaccctgaaaaaaaccctgattgagtccaaactacctgtcattacctgctatgccgatgccaagcctggtctgcagacacatggcttcatcatcagggtcaaggactatggctgcattgtgaagttctacaacaatgtgcagggactggtgcccaagcatgagctcagtactgagtatatccctgacccggagagagttttttacactggccaggtggtgaaggttgtcgtattgaactgtgagccatccaaagagaggatgctcttatccttcaagctgtcgagtgatccagagccaaagaaagagcctgcaggacacagtcagaagaaaggaaaagccattaacattgggcagttggtagatgtgaaggttttagagaagaccaaagatgggctggaggtggctgtcctgccccacaacatccgtgctttcctccccacatctcatctgtcggaccacgttgccaacggcccattgttacatcattggctccaggcaggtgacatccttcaccgagtcctgtgtctgagccagagcgaggggcgtgttcttctttgcaggaagccagccttggtctccacagtagaaggtggccaggatcccaagaacttctcagaaatccatcctggaatgctgctcattggttttgtgaagagcatcaaggactatggcgtgttcatccagttcccctcaggtcttagcggactggccccaaaagctatcatgagtgacaaatttgtgacctccacaagtgaccactttgttgagggccagacagtagcggcaaaggtgaccaatgtggatgaggagaagcagcggatgctgctgtcactgcggctgtcggactgtggtctgggggacttggctatcaccagcctcctcctcctgaatcagtgcctggaggagctgcagggcgtgcgcagccttatgagcaaccgagactctgtgttgatccagacgctggccgagatgaccccaggaatgttccttgacctagtggtgcaggaggtgttggaagatggctctgtggtattcagtgggggtccagtgcccgacctggtcctgaaagccagcagataccatcgcgcagggcaggaggtggaatctgggcagaaaaagaaggttgttatcttaaatgttgatcttttgaagttggaagtgcacgtttcccttcaccaggacttggtgaatagaaaagctagaaagctgaggaaaggcagcgaacaccaggcgattgtgcagcacttggagaagtcctttgccattgcctccttggtagagacgggccacctggcagctttctccctgacctctcacctcaacgacaccttccgctttgactcagagaaattgcaggtgggacagggtgtctccctaaccctcaagaccacagaaccaggagtgactggccttcttttggctgtggaggggccggctgccaagaggaccatgaggccgacccagaaggactctgagacagttgatgaggatgaagaagtggatccagctctgactgtagggaccataaagaagcacaccctctccatcggggacatggtcacagggactgtcaagtccattaagcctacccatgtggttgtgactctggaagatggcattattggctgtatccatgcctcccacattctagatgatgttccagagggcacctctcctactaccaagctgaaggttgggaagacggtcactgcccgagtgattggcgggcgagacatgaagacattcaagtatctcccaataagtcaccccagattcgttcgaaccatcccggagctgagtgttcggccaagtgagctggaggatggccacactgctcttaacactcactctgttagccccatggagaagattaaacagtaccaggccggccagactgttacttgcttcttaaagaaatacaatgtggtgaagaaatggcttgaggtggagattgccccagacatccgggggagaattcccttattgctcacttctctgagcttcaaggttctgaagcatccagataagaagttccgggttggccaggccctgagggccaccgttgttggcccagattcctccaagaccctcttatgtctgtccctcacaggtcctcacaagcttgaggaaggggaagtggccatgggccgagtggtgaaggtgactcccaacgaggggctgaccgtctccttcccctttgggaagataggaacagtcagtatatttcacatgagtgactcctactccgagacgcccctggaagacttcgtcccccagaaggttgtcagatgttacatcctgtccactgcagacaacgtattgactttgtcgctgcgatcatccagaacaaacccggagacgaaaagcaaagtagaagatccagagattaactccatccaggacattaaggaagggcagcttctgaggggctatgtagggtccatccagccacacggtgtgttctttcgccttggcccctccgttgtgggtttggctcggtactcccatgtctcccagcacagcccgtccaagaaagccctttataacaaacacctccctgaagggaagctgctcacagccagggtcctacgccttaaccaccagaagaacctggtagagctgtctttcctccccggagacactgggaagccagacgtgctttctgcttccttggaagggcaacttacaaagcaagaggagaggaaaacagaggctgaggagagagaccaaaaaggggaaaagaaaaatcagaaaaggaacgagaagaagaaccagaaggggcaggaggaggtggagatgcccagcaaggagaagcaacagccccagaagccacaggcgcagaagcggggcgggcgggagtgccgggagtctgggagtgagcaggaaagagtgagcaagaagccaaagaaagccggcctgtcagaggaggacgacagccttgtggacgtgtactatcgggagggaaaagaggaggcagaagagacgaatgtgctgcccaaggagaagcaaaccaagccagcagaagcgccccggctgcagctgtcttcaggcttcgcttggaatgtgggactagactctctgaccccggccttgccacctctagcagagagctcagacagcgaggaggatgagaagccacaccaagccacgataaagaaaagcaagaaagaaagggagttggagaagcagaaggcagagaaggaactgtcccgcattgaggaggcgctgatggatcctgggcggcagccagagtccgcggatgattttgaccgactggtgctgagctcccccaacagctccattctgtggctgcagtacatggctttccacctgcaggccacggagatcgagaaggcccgtgccgtggctgagagggcccttaagaccatctccttcagagaggagcaggagaagctgaacgtgtgggtggctctgctgaacctggagaacatgtacggctctcaggagtccctgaccaaggtctttgagcgagccgtgcagtacaacgagcctctcaaagtctttctccacctggctgacatctacgccaagtcagagaaattccaggaagctggtgaactctacaaccggatgctgaagcgtttccggcaggagaaagctgtgtggatcaaatacggcgccttccttctgcggaggagccaggctgcagccagtcaccgcgtgctgcagcgagccctggagtgcctgcctagcaaggagcatgtggatgtcattgccaagtttgcccagcttgagtttcagctgggggatgcagagcgggccaaagccatttttgagaacacgctgagcacctacccaaagcgcacagatgtctggtcggtctatatcgacatgaccatcaagcacggcagccagaaggacgtccgggacatctttgagcgggtcattcatctgagcttggcccccaagagaatgaagttcttcttcaagcgctacctggactacgagaagcagcatggcactgagaaggatgtgcaggcagtcaaggccaaggccctggagtatgtggaggccaagagctcagtgctagaggactagtggcaggctggctctgtgggacactgtcaacaatgggccagcccggccccgcctcgagtgcctgggcactcggaaaactgttacctcaggactctatttaaatgctgctttttctgcagcacgcttggggaaatcctgtcaggat

SEQ ID NO: 88 - protein, 1906 aa, Homo sapiens
MIKRDCGYPGLRVCEYRGARLVVAGCRRRGAGDPNMANLEESFPRGGTRKIHKPEKAFQQSVEQDNLFDISTEEGSTKRKKSQKGPAKTKKLKIEKRESSKSAREKFEILSVESLCEGMRILGCVKEVNELELVISLPNGLQGFVQVTEICDAYTKKLNEQVTQEQPLKDLLHLPELFSPGMLVRCVVSSLGITDRGKKSVKLSLNPKNVNRVLSAEALKPGMLLTGTVSSLEDHGYLVDIGVDGTRAFLPLLKAQEYIRQKNKGAKLKVGQYLNCIVEKVKGNGGVVSLSVGHSEVSTAIATEQQSWNLNNLLPGLVVKAQVQKVTPFGLTLNFLTFFTGVVDFMHLDPKKAGTYFSNQAVRACILCVHPRTRVVHLSLRPIFLQPGRPLTRLSCQNLGAVLDDVPVQGFFKKAGATFRLKDGVLAYARLSHLSDSKNVFNPEAFKPGNTHKCRIIDYSQMDELALLSLRTSIIEAQYLRYHDIEPGAVVKGTVLTIKSYGMLVKVGEQMRGLVPPMHLADILMKNPEKKYHIGDEVKCRVLLCDPEAKKLMMTLKKTLIESKLPVITCYADAKPGLQTHGFIIRVKDYGCIVKFYNNVQGLVPKHELSTEYIPDPERVFYTGQVVKVVVLNCEPSKERMLLSFKLSSDPEPKKEPAGHSQKKGKAINIGQLVDVKVLEKTKDGLEVAVLPHNIRAFLPTSHLSDHVANGPLLHHWLQAGDILHRVLCLSQSEGRVLLCRKPALVSTVEGGQDPKNFSEIHPGMLLIGFVKSIKDYGVFIQFPSGLSGLAPKAIMSDKFVTSTSDHFVEGQTVAAKVTNVDEEKQRMLLSLRLSDCGLGDLAITSLLLLNQCLEELQGVRSLMSNRDSVLIQTLAEMTPGMFLDLVVQEVLEDGSVVFSGGPVPDLVLKASRYHRAGQEVESGQKKKVVILNVDLLKLEVHVSLHQDLVNRKARKLRKGSEHQAIVQHLEKSFAIASLVETGHLAAFSLTSHLNDTFRFDSEKLQVGQGVSLTLKTTEPGVTGLLLAVEGPAAKRTMRPTQKDSETVDEDEEVDPALTVGTIKKHTLSIGDMVTGTVKSIKPTHVVVTLEDGIIGCIHASHILDDVPEGTSPTTKLKVGKTVTARVIGGRDMKTFKYLPISHPRFVRTIPELSVRPSELEDGHTALNTHSVSPMEKIKQYQAGQTVTCFLKKYNVVKKWLEVEIAPDIRGRIPLLLTSLSFKVLKHPDKKFRVGQALRATVVGPDSSKTLLCLSLTGPHKLEEGEVAMGRVVKVTPNEGLTVSFPFGKIGTVSIFHMSDSYSETPLEDFVPQKVVRCYILSTADNVLTLSLRSSRTNPETKSKVEDPEINSIQDIKEGQLLRGYVGSIQPHGVFFRLGPSVVGLARYSHVSQHSPSKKALYNKHLPEGKLLTARVLRLNHQKNLVELSFLPGDTGKPDVLSASLEGQLTKQEERKTEAEERDQKGEKKNQKRNEKKNQKGQEEVEMPSKEKQQPQKPQAQKRGGRECRESGSEQERVSKKPKKAGLSEEDDSLVDVYYREGKEEAEETNVLPKEKQTKPAEAPRLQLSSGFAWNVGLDSLTPALPPLAESSDSEEDEKPHQATIKKSKKERELEKQKAEKELSRIEEALMDPGRQPESADDFDRLVLSSPNSSILWLQYMAFHLQATEIEKARAVAERALKTISFREEQEKLNVWVALLNLENMYGSQESLTKVFERAVQYNEPLKVFLHLADIYAKSEKFQEAGELYNRMLKRFRQEKAVWIKYGAFLLRRSQAAASHRVLQRALECLPSKEHVDVIAKFAQLEFQLGDAERAKAIFENTLSTYPKRTDVWSVYIDMTIKHGSQKDVRDIFERVIHLSLAPKRMKFFFKRYLDYEKQHGTEKDVQAVKAKALEYVEAKSSVLED

SEQ ID NO: 89 - DNA, 4276 bp, Homo sapiens
  CDS (392)..(3268)
ggcttttcttccccttctgattttcccctccccccttttctccctttccgggtttggttccccccttttcttcccctctcccccctccttcccaagcccctttcccctcccccgtcccagtcccccctgcttcccagccctcggccccggggaagccccggccgagaaaagcccgcccccagaagcgcgccgccgccggccgtcggggccgagccgcagccgagcggccgtgggcccgggcggcgggcggagacgtgggcgccctccccgccaaggcccgtgcgagaggttagacttgtttcttatatgtgatgccattccagcactggactcatggaggctgagcatttattcaggagtccatagaggccactgtattctattgaagaacatgtctaacagtaacactactcaagagaccctggaaataatgaaagaatcagaaaaaaaactggtggaagaatctgtaaacaaaaacaagtttatatctaagactccaagtaaggaagaaattgagaaagaatgtgaagataccagtttgcgtcaggagacacagaggcggacatctaaccatggtcatgccaggaaaagagccaagtctaattccaagctaaagttggtgcgtagcctggcagtgtgtgaggagtcctccaccccatttgctgatgggccattagaaacccaggatataattcaattgcacatcagttgcccttctgacaaggaggaagaaaagtccacaaaagatgtctctgaaaaggaagacaaggacaaaaacaaagaaaagatcccaaggaagatgctgtccagagactccagccaggaatatacggactccactggaatagacctacatgaatttcttgtaaatacactgaaaaagaacccaagggacagaatgatgctgctaaaattagaacaggagattctggaatttattaatgacaacaataatcagttcaagaagttccctcagatgacctcatatcaccggatgctattacaccgggtagctgcctattttgggatggaccacaatgttgatcaaactgggaaagctgtcatcatcaacaaaactagtaacacaagaatccctgaacagaggttctcagaacatataaaggatgagaagaatacagaatttcaacagaggttcattctcaagagagatgatgccagtatggaccgagatgataaccagactggccagaacggatatctaaatgacatcagggggaaccgtgaaggactgagccgcacctcaagcagccgccagagcagcacagacagcgaactcaaatccctggagccacgcccttggagcagcacagactctgatggctctgtccggagcatgcgaccccctgtcaccaaagctagcagcttcagtggaatctctatccttacccgaggtgacagcatcggcagcagtaaaggcggcagtgcgggaaggatctccaggccaggtatggcactaggtgccccagaagtgtgcaaccaggtcacctcatcccagtctgtccgggggcttctcccttgtactgcccagcagcaacagcagcagcagcagcagcaacttcctgctctcccacccacgcctcagcaacagccacccttgaataatcacatgatctcacaggcagatgacctcagcaacccctttggacaaatgagccttagtcgccaaggttctactgaagcagctgacccatctgcagctctattccagaccccacttatctcccagcaccctcagcagactagcttcatcatggcttccacgggtcagcccctccccacttccaactattccacctctagccatgcaccacctactcagcaagttctgccaccccaggggtacatgcagccccctcaacagatccaggtttcttactatccccctggacaatatcctaactccaaccagcaatatcgacctctctctcacccggtggcctatagcccccaacgtggtcagcagctgcctcagccatcccagcagcctggtttacagcccatgatgcctaaccagcagcaggcggcttaccaaggcatgattggggtccagcagccacagaaccagggcctgctcagcagccagaggagcagcatggggggccagatgcaaggcctggtggttcagtacactccactgccttcttaccaagttccagtgggtagtgactcgcaaaatgtggtccagccgcctttccagcaacccatgctggtccctgtgagccagtctgtgcaaggaggcctcccagcagcgggggtaccagtgtactatagcatgatcccacctgctcagcagaacggtacgagcccttctgtagggtttctgcaaccccctggctctgagcagtaccagatgcctcagtctccctctccctgcagtccaccacagatgccacagcagtactcaggagtgtcaccttctggaccaggtgtagtggtcatgcagctgaatgtccctaatggaccccagccccctcagaacccatccatggtccagtggagtcattgtaaatactacagcatggaccagcgggggcagaagcctggagacctgtacagtcctgacagcagcccccaggccaacacacaaatgagcagcagccctgtcacatctcctacccagtctccagcaccctctcctgtcaccagcctcagcagtgtctgcacaggactcagtcccctgcctgtcctcacacagttcccccggcctgggggtccagcacagggtgatgggcgctactcccttttgggccagccattacagtacaatctgtccatctgccctcccttgctccatggccagtcaacttacacggtgcaccagggacagagtggactgaagcatggaaaccggggcaagagacaagcactcaaatctgcctccactgacctggggacagcagatgttgtcctggggcgggtgctggaggtgacagatctccctgagggcatcacccgtactgaggcggacaaactcttcacgcagctcgccatgtctggcgccaagatccagtggctcaaggatgctcaggggctgcctggagggggtgggggggacaacagtgggactgctgagaatggccgccactcggacctcgctgccttgtacaccattgtggctgtgttccccagccccctggctgcccaaaatgcctcccttcgtctcaacaactccgtgagtcgcttcaaacttcgaatggccaaaaagaactatgacctgaggatcctggagcgagccagctcccaataaatggaggaggggaaagggactgtcacagaagaagcaagggcagggtggagggggttgaaggatcctgacagaccatggacagaggcaggaagtaaggaaactgatgttaaactggaacctaagacagtgatgaagatggaaacacagatacctacactggcattggactccttcttgctcccctgccatgggtcctctctttttccctggttgaccccccttgcatcactcttcttcccatcctcttctttttttttttttttttttttttgagacggagtttcgctcttgtcaccccagctggagtgcagtagcacgatcttggctaactgcaacctccagctcctgggttcaggtgattctcctgcctcagcctcccaagtagctggcactacagacacgcgccaccatgcccggctaatttttgtatttttagtagagacggagtttcaccatgttggccaggctggcctcaaactcctgacctcaggtgatccacctgccttggccttccagagtgctgggattacaggcgtgagccactgtgcctggcttccatcctcttctatcatttttttaaatctcttctcctatcataaaattaatttctcattttttggtcaggtagaattgggaaagtcccacactgtcctcctattaccttaacatcccaagcttcctttccttttttggtctttatgaatatatttatatggacagaattaagataaacaaaattgattgccccattctctcacttccccatcttgtcttcctagaccccacagagttaaaacttgggattcccctggcccccccagaacacttgtatattgtttgtttgaggttcgtgccgcagtaacagacacagtatttaattgcacatacagatgtttgctgggtatattcactgtaaattttatttaatctgtttttttgtttgtttgggggttatttggggggaggttggttttgtttttaaatataaaaaaaaaaatctgtcactgg

SEQ ID NO: 90 - protein, 958 aa, Homo sapiens
MSNSNTTQETLEIMKESEKKLVEESVNKNKFISKTPSKEEIEKECEDTSLRQETQRRTSNHGHARKRAKSNSKLKLVRSLAVCEESSTPFADGPLETQDIIQLHISCPSDKEEEKSTKDVSEKEDKDKNKEKIPRKMLSRDSSQEYTDSTGIDLHEFLVNTLKKNPRDRMMLLKLEQEILEFINDNNNQFKKFPQMTSYHRMLLHRVAAYFGMDHNVDQTGKAVIINKTSNTRIPEQRFSEHIKDEKNTEFQQRFILKRDDASMDRDDNQTGQNGYLNDIRGNREGLSRTSSSRQSSTDSELKSLEPRPWSSTDSDGSVRSMRPPVTKASSFSGISILTRGDSIGSSKGGSAGRISRPGMALGAPEVCNQVTSSQSVRGLLPCTAQQQQQQQQQQLPALPPTPQQQPPLNNHMISQADDLSNPFGQMSLSRQGSTEAADPSAALFQTPLISQHPQQTSFIMASTGQPLPTSNYSTSSHAPPTQQVLPPQGYMQPPQQIQVSYYPPGQYPNSNQQYRPLSHPVAYSPQRGQQLPQPSQQPGLQPMMPNQQQAAYQGMIGVQQPQNQGLLSSQRSSMGGQMQGLVVQYTPLPSYQVPVGSDSQNVVQPPFQQPMLVPVSQSVQGGLPAAGVPVYYSMIPPAQQNGTSPSVGFLQPPGSEQYQMPQSPSPCSPPQMPQQYSGVSPSGPGVVVMQLNVPNGPQPPQNPSMVQWSHCKYYSMDQRGQKPGDLYSPDSSPQANTQMSSSPVTSPTQSPAPSPVTSLSSVCTGLSPLPVLTQFPRPGGPAQGDGRYSLLGQPLQYNLSICPPLLHGQSTYTVHQGQSGLKHGNRGKRQALKSASTDLGTADVVLGRVLEVTDLPEGITRTEADKLFTQLAMSGAKIQWLKDAQGLPGGGGGDNSGTAENGRHSDLAALYTIVAVFPSPLAAQNASLRLNNSVSRFKLRMAKKNYDLRILERASSQ

SEQ ID NO: 91 - DNA, 4330 bp, Homo sapiens
  CDS (392)..(3322)
ggcttttcttccccttctgattttcccctccccccttttctccctttccgggtttggttccccccttttcttcccctctcccccctccttcccaagcccctttcccctcccccgtcccagtcccccctgcttcccagccctcggccccggggaagccccggccgagaaaagcccgcccccagaagcgcgccgccgccggccgtcggggccgagccgcagccgagcggccgtgggcccgggcggcgggcggagacgtgggcgccctccccgccaaggcccgtgcgagaggttagacttgtttcttatatgtgatgccattccagcactggactcatggaggctgagcatttattcaggagtccatagaggccactgtattctattgaagaacatgtctaacagtaacactactcaagagaccctggaaataatgaaagaatcagaaaaaaaactggtggaagaatctgtaaacaaaaacaagtttatatctaagactccaagtaaggaagaaattgagaaagaatgtgaagataccagtttgcgtcaggagacacagaggcggacatctaaccatggtcatgccaggaaaagagccaagtctaattccaagctaaagttggtgcgtagcctggcagtgtgtgaggagtcctccaccccatttgctgatgggccattagaaacccaggatataattcaattgcacatcagttgcccttctgacaaggaggaagaaaagtccacaaaagatgtctctgaaaaggaagacaaggacaaaaacaaagaaaagatcccaaggaagatgctgtccagagactccagccaggaatatacggactccactggaatagacctacatgaatttcttgtaaatacactgaaaaagaacccaagggacagaatgatgctgctaaaattagaacaggagattctggaatttattaatgacaacaataatcagttcaagaagttccctcagatgacctcatatcaccggatgctattacaccgggtagctgcctattttgggatggaccacaatgttgatcaaactgggaaagctgtcatcatcaacaaaactagtaacacaagaatccctgaacagaggttctcagaacatataaaggatgagaagaatacagaatttcaacagaggttcattctcaagagagatgatgccagtatggaccgagatgataaccagactggccagaacggatatctaaatgacatcagactctccaaagaagccttttcttctagctctcacaagagaaggcagatttttagggggaaccgtgaaggactgagccgcacctcaagcagccgccagagcagcacagacagcgaactcaaatccctggagccacgcccttggagcagcacagactctgatggctctgtccggagcatgcgaccccctgtcaccaaagctagcagcttcagtggaatctctatccttacccgaggtgacagcatcggcagcagtaaaggcggcagtgcgggaaggatctccaggccaggtatggcactaggtgccccagaagtgtgcaaccaggtcacctcatcccagtctgtccgggggcttctcccttgtactgcccagcagcaacagcagcagcagcagcagcaacttcctgctctcccacccacgcctcagcaacagccacccttgaataatcacatgatctcacaggcagatgacctcagcaacccctttggacaaatgagccttagtcgccaaggttctactgaagcagctgacccatctgcagctctattccagaccccacttatctcccagcaccctcagcagactagcttcatcatggcttccacgggtcagcccctccccacttccaactattccacctctagccatgcaccacctactcagcaagttctgccaccccaggggtacatgcagccccctcaacagatccaggtttcttactatccccctggacaatatcctaactccaaccagcaatatcgacctctctctcacccggtggcctatagcccccaacgtggtcagcagctgcctcagccatcccagcagcctggtttacagcccatgatgcctaaccagcagcaggcggcttaccaaggcatgattggggtccagcagccacagaaccagggcctgctcagcagccagaggagcagcatggggggccagatgcaaggcctggtggttcagtacactccactgccttcttaccaagttccagtgggtagtgactcgcaaaatgtggtccagccgcctttccagcaacccatgctggtccctgtgagccagtctgtgcaaggaggcctcccagcagcgggggtaccagtgtactatagcatgatcccacctgctcagcagaacggtacgagcccttctgtagggtttctgcaaccccctggctctgagcagtaccagatgcctcagtctccctctccctgcagtccaccacagatgccacagcagtactcaggagtgtcaccttctggaccaggtgtagtggtcatgcagctgaatgtccctaatggaccccagccccctcagaacccatccatggtccagtggagtcattgtaaatactacagcatggaccagcgggggcagaagcctggagacctgtacagtcctgacagcagcccccaggccaacacacaaatgagcagcagccctgtcacatctcctacccagtctccagcaccctctcctgtcaccagcctcagcagtgtctgcacaggactcagtcccctgcctgtcctcacacagttcccccggcctgggggtccagcacagggtgatgggcgctactcccttttgggccagccattacagtacaatctgtccatctgccctcccttgctccatggccagtcaacttacacggtgcaccagggacagagtggactgaagcatggaaaccggggcaagagacaagcactcaaatctgcctccactgacctggggacagcagatgttgtcctggggcgggtgctggaggtgacagatctccctgagggcatcacccgtactgaggcggacaaactcttcacgcagctcgccatgtctggcgccaagatccagtggctcaaggatgctcaggggctgcctggagggggtgggggggacaacagtgggactgctgagaatggccgccactcggacctcgctgccttgtacaccattgtggctgtgttccccagccccctggctgcccaaaatgcctcccttcgtctcaacaactccgtgagtcgcttcaaacttcgaatggccaaaaagaactatgacctgaggatcctggagcgagccagctcccaataaatggaggaggggaaagggactgtcacagaagaagcaagggcagggtggagggggttgaaggatcctgacagaccatggacagaggcaggaagtaaggaaactgatgttaaactggaacctaagacagtgatgaagatggaaacacagatacctacactggcattggactccttcttgctcccctgccatgggtcctctctttttccctggttgaccccccttgcatcactcttcttcccatcctcttctttttttttttttttttttttttgagacggagtttcgctcttgtcaccccagctggagtgcagtagcacgatcttggctaactgcaacctccagctcctgggttcaggtgattctcctgcctcagcctcccaagtagctggcactacagacacgcgccaccatgcccggctaatttttgtatttttagtagagacggagtttcaccatgttggccaggctggcctcaaactcctgacctcaggtgatccacctgccttggccttccagagtgctgggattacaggcgtgagccactgtgcctggcttccatcctcttctatcatttttttaaatctcttctcctatcataaaattaatttctcattttttggtcaggtagaattgggaaagtcccacactgtcctcctattaccttaacatcccaagcttcctttccttttttggtctttatgaatatatttatatggacagaattaagataaacaaaattgattgccccattctctcacttccccatcttgtcttcctagaccccacagagttaaaacttgggattcccctggcccccccagaacacttgtatattgtttgtttgaggttcgtgccgcagtaacagacacagtatttaattgcacatacagatgtttgctgggtatattcactgtaaattttatttaatctgtttttttgtttgtttgggggttatttggggggaggttggttttgtttttaaatataaaaaaaaaaatctgtcactgg

SEQ ID NO: 92 - protein, 976 aa, Homo sapiens
MSNSNTTQETLEIMKESEKKLVEESVNKNKFISKTPSKEEIEKECEDTSLRQETQRRTSNHGHARKRAKSNSKLKLVRSLAVCEESSTPFADGPLETQDIIQLHISCPSDKEEEKSTKDVSEKEDKDKNKEKIPRKMLSRDSSQEYTDSTGIDLHEFLVNTLKKNPRDRMMLLKLEQEILEFINDNNNQFKKFPQMTSYHRMLLHRVAAYFGMDHNVDQTGKAVIINKTSNTRIPEQRFSEHIKDEKNTEFQQRFILKRDDASMDRDDNQTGQNGYLNDIRLSKEAFSSSSHKRRQIFRGNREGLSRTSSSRQSSTDSELKSLEPRPWSSTDSDGSVRSMRPPVTKASSFSGISILTRGDSIGSSKGGSAGRISRPGMALGAPEVCNQVTSSQSVRGLLPCTAQQQQQQQQQQLPALPPTPQQQPPLNNHMISQADDLSNPFGQMSLSRQGSTEAADPSAALFQTPLISQHPQQTSFIMASTGQPLPTSNYSTSSHAPPTQQVLPPQGYMQPPQQIQVSYYPPGQYPNSNQQYRPLSHPVAYSPQRGQQLPQPSQQPGLQPMMPNQQQAAYQGMIGVQQPQNQGLLSSQRSSMGGQMQGLVVQYTPLPSYQVPVGSDSQNVVQPPFQQPMLVPVSQSVQGGLPAAGVPVYYSMIPPAQQNGTSPSVGFLQPPGSEQYQMPQSPSPCSPPQMPQQYSGVSPSGPGVVVMQLNVPNGPQPPQNPSMVQWSHCKYYSMDQRGQKPGDLYSPDSSPQANTQMSSSPVTSPTQSPAPSPVTSLSSVCTGLSPLPVLTQFPRPGGPAQGDGRYSLLGQPLQYNLSICPPLLHGQSTYTVHQGQSGLKHGNRGKRQALKSASTDLGTADVVLGRVLEVTDLPEGITRTEADKLFTQLAMSGAKIQWLKDAQGLPGGGGGDNSGTAENGRHSDLAALYTIVAVFPSPLAAQNASLRLNNSVSRFKLRMAKKNYDLRILERASSQ

SEQ ID NO: 93 - protein, 299 aa, Homo sapiens
MVDKKLVVVFGGTGAQGGSVARTLLEDGTFKVRVVTRNPRKKAAKELRLQGAEVVQGDQDDQVIMELALNGAYATFIVTNYWESCSQEQEVKQGKLLADLARRLGLHYVVYSGLENIKKLTAGRLAAAHFDGKGEVEEYFRDIGVPMTSVRLPCYFENLLSHFLPQKAPDGKSYLLSLPTGDVPMDGMSVSDLGPVVLSLLKMPEKYVGQNIGLSTCRHTAEEYAALLTKHTRKVVHDAKMTPEDYEKLGFPGARDLANMFRFYALRPDRDIELTLRLNPKALTLDQWLEQHKGDFNLL

SEQ ID NO: 94 - protein, 116 aa, Homo sapiens [sequence omitted]

SEQ ID NO: 95 - protein, 78 aa, Homo sapiens
MRASLILIREILWEMILKVLIEGLQLPIHVFREPLRFHKRSLQSFVLVQNPSGKFQFLRPLRKLIQMPKKDRIEVQIT

SEQ ID NO: 96 - protein, 828 aa, Homo sapiens
MRNGKTECYLSIQTQENFPANLNELVNCIVISSLVTTQRKLKAMSLLGSRNQLARAVLNPNPMDFCTKDLLTTTSERIIAYLRDFNEDQKKAIETAYAMVKHSPSVAKICLIHGPPGTGKSKTIVGLLYRLLTENQRKGHSDENSNAKIKQNRVLVCAPSNAAVDELMKKIILEFKEKCKDKKNPLGNCGDINLVRLGPEKSINSEVLKFSLDSQVNHRMKKELPSHVQAMHKRKEFLDYQLDELSRQRALCRGGREIQRQELDENISKVSKERQELASKIKEVQGRPQKTQSIIILESHIICCTLSTSGGLLLESAFRGQGGVPFSCVIVDEAGQSCEIETLTPLIHRCNKLILVGDPKQLPPTVISMKAQEYGYDQSMMARFCRLLEENVEHNMISRLPILQLTVQYRMHPDICLFPSNYVYNRNLKTNRQTEAIRCSSDWPFQPYLVFDVGDGSERRDNDSYINVQEIKLVMEIIKLIKDKRKDVSFRNIGIITHYKAQKTMIQKDLDKEFDRKGPAEVDTVDAFQGRQKDCVIVTCVRANSIQGSIGFLASLQRLNVTITRAKYSLFILGHLRTLMENQHWNQLIQDAQKRGAIIKTCDKNYRHDAVKILKLKPVLQRSLTHPPTIAPEGSRPQGGLPSSKLDSGFAKTSVAASLYHTPSDSKEITLTVTSKDPERPPVHDQLQDPRLLKRMGIEVKGGIFLWDPQPSSPQHPGATPPTGEPGFPVVHQDLSHIQQPAAVVAALSSHKPPVRGEPPAASPEASTCQSKCDDPEEELCHRREARAFSEGEQEKCGSETHHTRRNSRWDKRTLEQEDSSSKKRKLL

SEQ ID NO: 97 - protein, 237 aa, Homo sapiens
MLCKQTWPHWKGPARSGVEVLFNELEIPVEEYSFGRSKIFIRNPRTLFKLEDLRKQRLEDLATLIQKIYRGWKCRTHFLLMKKSQIVIAAWYRRYAQQKRYQQTKSSALVIQSYIRGWKARKILRELKHQKRCKEAVTTIAAYWHGTQVRREYRKFFRANAGKKIYEFTLQRIVQKYFLEMKNKMPSLSPIDKNWPSRPYLFLDSTHKELKRIFHLWRVKNTGTNSQTSRNLFMKRN

SEQ ID NO: 98 - protein, 811 aa, Homo sapiens
MNKVEQKSQESVSFKDVTVGFTQEEWQHLDPSQRALYRDVMLENYSNLVSVGYCVHKPEVIFRLQQGEEPWKQEEEFPSQSFPEVWTADHLKERSQENQSKHLWEVVFINNEMLTKEQGDVIGIPFNVDVSSFPSRKMFCQCDSCGMSFNTVSELVISKINYLGKKSDEFNACGKLLLNIKHDETHTQEKNEVLKNRNTLSHHEETLQHEKIQTLEHNFEYSICQETLLEKAVFNTQKRENAEENNCDYNEFGRTLCDSSSLLFHQISPSRDNHYEFSDCEKFLCVKSTLSKPHGVSMKHYDCGESGNNFRRKLCLSHLQKGDKGEKHFECNECGKAFWEKSHLTRHQRVHTGQKPFQCNECEKAFWDKSNLTKHQRSHTGEKPFECNECGKAFSHKSALTLHQRTHTGEKPYQCNACGKTFCQKSDLTKHQRTHTGLKPYECYECGKSFRVTSHLKVHQRTHTGEKPFECLECGKSFSEKSNLTQHQRIHIGDKSYECNACGKTFYHKSLLTRHQIIHTGWKPYECYECGKTFCLKSDLTVHQRTHTGQKPFACPECGKFFSHKSTLSQHYRTHTGEKPYECHECGKIFYNKSYLTKHNRTHTGEKPYECNECGKAFYQKSQLTQHQRIHIGEKPYKCNECGKAFCHKSALIVHQRTHTQEKPYKCNECGKSFCVKSGLIFHERKHTGEKPYECNECGKFFRHKSSLTVHHRAHTGEKSCQCNECGKIFYRKSELAQHQRSHTGEKPYECNTCRKTFSQKSNLIVHQRRHIGENLMNEMDIRNFQPQVSLHNASEYSHCGESPDDILNVQ

SEQ ID NO: 99 - protein, 558 aa, Homo sapiens
MAIPGRQYGLILPKKTQQLHPVLQKPSVFGNDSDDDDETSVSESLQREAAKKQAMKQTKLEIQKALAEDATVYEYDSIYDEMQKKKEENNPKLLLGKDRKPKYIHNLLKAVEIRKKEQEKRMEKKIQREREMEKGEFDDKEAFVTSAYKKKLQERAEEEEREKRAAALEACLDVTKQKDLSGFYRHLLNQAVGEEEVPKCSFREARSGIKEEKSRGFSNEVSSKNRIPQEKCILQTDVKVEENPDADSDFDAKSSADDEIEETRVNCRREKVIETPENDFKHHRSQNHSRSPSEERGHSTRHHTKGSRTSRGHEKREDQHQQKQSRDQENHYTDRDYRKERDSHRHREASHRDSHWKRHEQEDKPRARDQRERSDRVWKREKDREKYSQREQERDRQQNDQNRPSEKGEKEEKSKAKEEHMKVRKERYENNDKYRDREKREVGVQSSERNQDRKESSPNSRAKDKFLDQERSNKMRNMAKDKERNQEKPSNSESSLGAKHRLTEEGQEKGKEQERPPEAVSKFAKRNNEETVMSARDRYLARQMARVNAKTYIEKEDD

SEQ ID NO: 100 - protein, 366 aa, Homo sapiens
MLLLRCQLKQAPPQKVSFRFCVVMGKQQSKLKHSTYKYGPDEIIEERIQTKAFQEYSPAHMDTVSVVAALNSDLCVSGGKDKTVVAYNWKTGNVVKRFKGHEHEITKVACIPKSSQFFSASRDRMVMMWDLHGSSQPRQQLCGHAMVVTGLAVSPDSSQLCTGSRDNTLLLWDVVTGQSVERASVSRNVVTHLCWVPREPYILQTSEDKTLRLWDSRGLQVAHMFPAKQHIQTYCEVSVDGHKCISCSNGFGGEGCEATLWDLRQTRNRICEYKGHFQTVASCVFLPRALALMPLIATSSHDCKVKIWNQDTGACLFTLSLDGSGPLTSLAVGDAISLLCASFNRGIHLLRMDHSQGLELQEVAAF

SEQ ID NO: 101 - protein, 687 aa, Homo sapiens
MFGKLMTIAKNLPDPGKAQDFVKKFNQVLGDDEKLRSQLELLISPTCSCKQADICVREIARKLANPKQPTNPFLEMVKFLLERIAPVHIDSEAISALVKLMNKSIEGTADDEEEGVSPDTAIRSGLELLKVLSFTHPTSFHSAETYESLLQCLRMEDDKVAEAAIQIFRNTGHKIETDLPQIRSTLIPILHQKAKRGTPHQAKQAVHCIHAIFTNKEVQLAQIFEPLSRSLNADVPEQLITPLVSLGHISMLAPDQFASPMKSVVANFIVKDLLMNDRSTGEKNGKLWSPDEEVSPEVLAKVQAIKLLVRWLLGMKNNQSKSANSTLRLLSAMLVSEGDLTEQKRISKSDMSRLRLAAGSAIMKLAQEPCYHEIITPEQFQLCALVINDECYQVRQIFAQKLHKALVKLLLPLEYMAIFALCAKDPVKERRAHARQCLLKNISIRREYIKQNPMATEKLLSLLPEYVVPYMIHLLAHDPDFTRSQDVDQLRDIKECLWFMLEVLMTKNENNSHAFMKKMAENIKLTRDAQSPDESKTNEKLYTVCDVALCVINSKSALCNADSPKDPVLPMKFFTQPEKDFCNDKSYISEETRVLLLTGKPKPAGVLGAVNKPLSATGRKPYVRSTGTETGSNINVNSELNPSTGNRSREQSSEAAETGVSENEENPVRIISVTPVKNIDPVKNKGN

SEQ ID NO: 102 - protein, 653 aa, Homo sapiens
MAAAAASHLNLDALREVLECPICMESITEEQLRPKLLHCGHTICRQCLEKLLASSINGVRCPFCSKITRITSLTQLTDNLTVLKIIDTAGLSEAVGLLMCRSCGRRLPRQFCRSCGLVLCEPCREADHQPPGHCTLPVKEAAEERRRDFGEKLTRLRELMGELQRRKAALEGVSKDLQARYKAVLQEYGHEERRVQDELARSRKFFTGSLAEVEKSNSQVVEEQSYLLNIAEVQAVSRCDYFLAKIKQADVALLEETADEEEPELTASLPRELTLQDVELLKVGHVGPLQIGQAVKKPRTVNVEDSWAMEATASAASTSVTFREMDMSPEEVVASPRASPAKQRGPEAASNIQQCLFLKKMGAKGSTPGMFNLPVSLYVTSQGEVLVADRGNYRIQVFTRKGFLKEIRRSPSGIDSFVLSFLGADLPNLTPLSVAMNCQGLIGVTDSYDNSLKVYTLDGHCVACHRSQLSKPWGITALPSGQFVVTDVEGGKLWCFTVDRGSGVVKYSCLCSAVRPKFVTCDAEGTVYFTQGLGLNLENRQNEHHLEGGFSIGSVGPDGQLGRQISHFFSENEDFRCIAGMCVDARGDLIVADSSRKEILHFPKGGGYSVLIREGLTCPVGIALTPKGQLLVLDCWDHCIKIYSYHLRRYSTP

SEQ ID NO: 103 - protein, 138 aa, Homo sapiens
MATRRLGVGETLGALNAALGPGGPVWTKETRTRHLRSRDFLAPHRALQARFDDGQVPEHLLHALACLQGPGVAPVLRCAPTPAGLSLQLQRSAVFERVLSAVAAYATPASPASLGQRVLLHCPALRSSPCALTGCACA

SEQ ID NO: 104 - protein, 2355 aa, Homo sapiens
MLRGPGPGLLLLAVQCLGTAVPSTGASKSKRQAQQMVQPQSPVAVSQSKPGCYDNGKHYQINQQWERTYLGNALVCTCYGGSRGFNCESKPEAEETCFDKYTGNTYRVGDTYERPKDSMIWDCTCIGAGRGRISCTIANRCHEGGQSYKIGDTWRRPHETGGYMLECVCLGNGKGEWTCKPIAEKCFDHAAGTSYVVGETWEKPYQGWMMVDCTCLGEGSGRITCTSRNRCNDQDTRTSYRIGDTWSKKDNRGNLLQCICTGNGRGEWKCERHTSVQTTSSGSGPFTDVRAAVYQPQPHPQPPPYGHCVTDSGVVYSVGMQWLKTQGNKQMLCTCLGNGVSCQETAVTQTYGGNSNGEPCVLPFTYNGRTFYSCTTEGRQDGHLWCSTTSNYEQDQKYSFCTDHTVLVQTRGGNSNGALCHFPFLYNNHNYTDCTSEGRRDNMKWCGTTQNYDADQKFGFCPMAAHEEICTTNEGVMYRIGDQWDKQHDMGHMMRCTCVGNGRGEWTCIAYSQLRDQCIVDDITYNVNDTFHKRHEEGHMLNCTCFGQGRGRWKCDPVDQCQDSETGTFYQIGDSWEKYVHGVRYQCYCYGRGIGEWHCQPLQTYPSSSGPVEVFITETPSQPNSHPIQWNAPQPSHISKYILRWRPKNSVGRWKEATIPGHLNSYTIKGLKPGVVYEGQLISIQQYGHQEVTRFDFTTTSTSTPVTSNTVTGETTPFSPLVATSESVTEITASSFVVSWVSASDTVSGFRVEYELSEEGDEPQYLDLPSTATSVNIPDLLPGRKYIVNVYQISEDGEQSLILSTSQTTAPDAPPDPTVDQVDDTSIVVRWSRPQAPITGYRIVYSPSVEGSSTELNLPETANSVTLSDLQPGVQYNITIYAVEENQESTPVVIQQETTGTPRSDTVPSPRDLQFVEVTDVKVTIMWTPPESAVTGYRVDVIPVNLPGEHGQRLPISRNTFAEVTGLSPGVTYYFKVFAVSHGRESKPLTAQQTTKLDAPTNLQFVNETDSTVLVRWTPPRAQITGYRLTVGLTRRGQPRQYNVGPSVSKYPLRNLQPASEYTVSLVAIKGNQESPKATGVFTTLQPGSSIPPYNTEVTETTIVITWTPAPRIGFKLGVRPSQGGEAPREVTSDSGSIVVSGLTPGVEYVYTIQVLRDGQERDAPIVNKVVTPLSPPTNLHLEANPDTGVLTVSWERSTTPDITGYRITTTPTNGQQGNSLEEVVHADQSSCTFDNLSPGLEYNVSVYTVKDDKESVPISDTIIPAVPPPTDLRFTNIGPDTMRVTWAPPPSIDLTNFLVRYSPVKNEEDVAELSISPSDNAVVLTNLLPGTEYVVSVSSVYEQHESTPLRGRQKTGLDSPTGIDFSDITANSFTVHWIAPRATITGYRIRHHPEHFSGRPREDRVPHSRNSITLTNLTPGTEYVVSIVALNGREESPLLIGQQSTVSDVPRDLEVVAATPTSLLISWDAPAVTVRYYRITYGETGGNSPVQEFTVPGSKSTATISGLKPGVDYTITVYAVTGRGDSPASSKPISINYRTEIDKPSQMQVTDVQDNSISVKWLPSSSPVTGYRVTTTPKNGPGPTKTKTAGPDQTEMTIEGLQPTVEYVVSVYAQNPSGESQPLVQTAVTNIDRPKGLAFTDVDVDSIKIAWESPQGQVSRYRVTYSSPEDGIHELFPAPDGEEDTAELQGLRPGSEYTVSVVALHDDMESQPLIGTQSTAIPAPTDLKFTQVTPTSLSAQWTPPNVQLTGYRVRVTPKEKTGPMKEINLAPDSSSVVVSGLMVATKYEVSVYALKDTLTSRPAQGVVTTLENVSPPRRARVTDATETTITISWRTKTETITGFQVDAVPANGQTPIQRTIKPDVRSYTITGLQPGTDYKIYLYTLNDNARSSPVVIDASTAIDAPSNLRFLATTPNSLLVSWQPPRARITGYIIKYEKPGSPPREVVPRPRPGVTEATITGLEPGTEYTIYVIALKNNQKSEPLIGRKKTDELPQLVTLPHPNLHGPEILDVPSTVQKTPFVTHPGYDTGNGIQLPGTSGQQPSVGQQMIFEEHGFRRTTPPTTATPIRHRPRPYPPNVGQEALSQTTISWAPFQDTSEYIISCHPVGTDEEPLQFRVPGTSTSATLTGLTRGATYNIIVEALKDQQRHKVREEVVTVGNSVNEGLNQPTDDSCFDPYTVSHYAVGDEWERMSESGFKLLCQCLGFGSGHFRCDSSRWCHDNGVNYKIGEKWDRQGENGQMMSCTCLGNGKGEFKCDPHEATCYDDGKTYHVGEQWQKEYLGAICSCTCFGGQRGWRCDNCRRPGGEPSPEGTTGQSYNQYSQRYHQRTNTNVNCPIECFMPLDVQADREDSRE

SEQ ID NO: 105 - protein, 596 aa, Homo sapiens
MSLSMRDPVIPGTSMAYHPFLPHRAPDFAMSAVLGHQPPFFPALTLPPNGAAALSLPGALAKPIMDQLVGAAETGIPFSSLGPQAHLRPLKTMEPEEEVEDDPKVHLEAKELWDQFHKRGTEMVITKSGRRMFPPFKVRCSGLDKKAKYILLMDIIAADDCRYKFHNSRWMVAGKADPEMPKRMYIHPDSPATGEQWMSKVVTFHKLKLTNNISDKHGFTLAFPSDHATWQGNYSFGTQTILNSMHKYQPRFHIVRANDILKLPYSTFRTYLFPETEFIAVTAYQNDKITQLKIDNNPFAKGFRDTGNGRREKRKQLTLQSMRVFDERHKKENGTSDESSSEQAAFNCFAQASSPAASTVGTSNLKDLCPSEGESDAEAESKEEHGPEACDAAKISTTTSEEPCRDKGSPAVKAHLFAAERPRDSGRLDKASPDSRHSPATISSSTRGLGAEERRSPVREGTAPAKVEEARALPGKEAFAPLTVQTDAARSSVHRHPFLNLNTMRPRLRYSPYSIPVPVPDGSSLLTTALAASPASVAVDSGSELNSRSSTLSSSSMSLSPKLCAEKEAATSELQSIQRLVSGLEAKPDRSRSASP

SEQ ID NO: 106 - protein, 1298 aa, Homo sapiens
MVTGAGVVLGDNDAPPGTSASQEGDGSVNDGTEGESAVTSTGITEDGEGPASCTGSEDSSEGFAISSESEENGESAMDSTVAKEGTNVPLVAAGPCDDEGIVTSTGAKEEDEEGEDVVTSTGRGNEIGHASTCTGLGEESEGVLICESAEGDSQIGTVVEHVEAEAGAAIMNANENNVDSMSGTEKGSKDTDICSSAKGIVESSVTSAVSGKDEVTPVPGGCEGPMTSAASDQSDSQLEKVEDTTISTGLVGGSYDVLVSGEVPECEVAHTSPSEKEDEDIITSVENEECDGLMATTASGDITNQNSLAGGKNQGKVLIISTSTTNDYTPQVSAITDVEGGLSDALRTEENMEGTRVTTEEFEAPMPSAVSGDDSQLTASRSEEKDECAMISTSIGEEFELPISSATTIKCAESLQPVAAAVEERATGPVLISTADFEGPMPSAPPEAESPLASTSKEEKDECALISTSIAEECEASVSGVVVESENERAGTVMEEKDGSGIISTSSVEDCEGPVSSAVPQEEGDPSVTPAEEMGDTAMISTSTSEGCEAVMIGAVLQDEDRLTITRVEDLSDAAIISTSTAECMPISASIDRHEENQLTADNPEGNGDLSATEVSKHKVPMPSLIAENNCRCPGPVRGGKEPGPVLAVSTEEGHNGPSVHKPSAGQGHPSAVCAEKEEKHGKECPEIGPFAGRGQKESTLHLINAEEKNVLLNSLQKEDKSPETGTAGGSSTASYSAGRGLEGNANSPAHLRGPEQTSGQTAKDPSVSIRYLAAVNTGAIKADDMPPVQGTVAEHSFLPAEQQGSEDNLKTSTTKCITGQESKIAPSHTMIPPATYSVALLAPKCEQDLTIKNDYSGKWTDQASAEKTGDDNSTRKSFPEEGDIMVTVSSEENVCDIGNEESPLNVLGGLKLKANLKMEAYVPSEEEKNGEILAPPESLCGGKPSGIAELQREPLLVNESLNVENSGFRTNEEIHSESYNKGEISSGRKDNAEAISGHSVEADPKEVEEEERHMPKRKRKQHYLSSEDEPDDNPDVLDSRIETAQRQCPETEPHDTKEENSRDLEELPKTSSETNSTTSRVMEEKDEYSSSETTGEKPEQNDDDTIKSQEEDQPIIIKRKRGRPRKYPVETTLKMKDDSKTDTGIVTVEQSPSSSKLKVMQTDESNKETANLQERSISNDDGEEKIVTSVRRRGRKPKRSLTVSDDAESSEPERKRQKSVSDPVEDKKEQESDEEEEEEEEDEPSGATTRSTTRSEAQRSKTQLSPSIKRKREVSPPGARTRGQQRVEEAPVKKAKR

SEQ ID NO: 107 - skipped

SEQ ID NO: 108 - protein, 784 aa, Homo sapiens
MVGKHLGARKDHPGLKAKENDENCGPTTTVFVGNISEKASDMLIRQLLAKCGLVLSWKRVQGASGKLQAFGFCEYKEPESTLRALRLLHDLQIGEKKLLVKVDAKTKAQLDEWKAKKKASNGNARPETVTNDDEEALDEETKRRDQMIKGAIEVLIREYSSELNAPSQESDSHPRKKKKEKKEDIFRRFPVAPLIPYPLITKEDINAIEMEEDKRDLISREISKFRDTHKKLEEEKGKKEKERQEIEKERRERERERERERERREREREREREREREKEKERERERERDRDRDRTKERDRDRDRERDRDRDRERSSDRNKDRSRSREKSRDREREREREREREREREREREREREREREREREREREKDKKRDREEDEEDAYERRKLERKLREKEAAYQERLKNWEIRERKKTREYEKEAEREEERRREMAKEAKRLKEFLEDYDDDRDDPKYYRGSALQKRLRDREKEMEADERDRKREKEELEEIRQRLLAEGHPDPDAELQRMEQEAERRRQPQIKQEPESEEEEEEKQEKEEKREEPMEEEEEPEQKPCLKPTLRPISSAPSVSSASGNATPNTPGDESPCGIIIPHENSPDQQQPEEHRPKIGLSLKLGASNSPGQPNSVKRKKLPVDSVFNKFEDEDSDDVPRKRKLVPLDYGEDDKNATKGTVNTEEKRKHIKSLIEKIPTAKPELFAYPLDWSIVDSILMERRIRPWINKKIIEYIGEEEATLVDFVCSKVMAHSSPQSILDDVAMVLDEEAEVFIVKMWRLLIYETEAKKIGLVK

SEQ ID NO: 109 - protein, 735 aa, Homo sapiens
KCGLVLSWKRVQGASGKLQAFGFCEYKEPESTLRALRLLHDLQIGEKKLLVKVDAKTKAQLDEWKAKKKASNGNARPETVTNDDEEALDEETKRRDQMIKGAIEVLIREYSSELNAPSQESDSHPRKKKKEKKEDIFRRFPVAPLIPYPLITKEDINAIEMEEDKRDLISREISKFRDTHKKLEEEKGKKEKERQEIEKERRERERERERERERREREREREREREREKEKERERERERDRDRDRTKERDRDRDRERDRDRDRERSSDRNKDRSRSREKSRDREREREREREREREREREREREREREREREREREREKDKKRDREEDEEDAYERRKLERKLREKEAAYQERLKNWEIRERKKTREYEKEAEREEERRREMAKEAKRLKEFLEDYDDDRDDPKYYRGSALQKRLRDREKEMEADERDRKREKEELEEIRQRLLAEGHPDPDAELQRMEQEAERRRQPQIKQEPESEEEEEEKQEKEEKREEPMEEEEEPEQKPCLKPTLRPISSAPSVSSASGNATPNTPGDESPCGIIIPHENSPDQQQPEEHRPKIGLSLKLGASNSPGQPNSVKRKKLPVDSVFNKFEDEDSDDVPRKRKLVPLDYGEDDKNATKGTVNTEEKRKHIKSLIEKIPTAKPELFAYPLDWSIVDSILMERRIRPWINKKIIEYIGEEEATLVDFVCSKVMAHSSPQSILDDVAMVLDEEAEVFIVKMWRLLIYETEAKKIGLVK

SEQ ID NO: 110 - protein, 556 aa, Homo sapiens
METESGNQEKVMEEESTEKKKEVEKKKRSRVKQVLADIAKQVDFWFGDANLHKDRFLREQIEKSRDGYVDISLLVSFNKMKKLTTDGKLIARALRSSAVVELDLEGTRIRRKKPLGERPKDEDERTVYVELLPKNVNHSWIERVFGKCGNVVYISIPHYKSTGDPKGFAFVEFETKEQAAKAIEFLNNPPEEAPRKPGIFPKTVKNKPIPALRVVEEKKKKKKKKGRMKKEDNIQAKEENMDTSNTSISKMKRSRPTSEGSDIESTEPQKQCSKKKKKRDRVEASSLPEVRTGKRKRSSSEDAESLAPRSKVKKIIQKDIIKEASEASKENRDIEISTEEEKDTGDLKDSSLLKTKRKHKKKHKERHKMGEEVIPLRVLSKSEWMDLKKEYLALQKASMASLKKTISQIKSESEMETDSGVPQNTGMKNEKTANREECRTQEKVNATGPQFVSGVIVKIISTEPLPGRKQVRDTLAAISEVLYVDLLEGDTECHARFKTPEDAQAVINAYTEINKKHCWKLEILSGDHEQGIGRRFWLIDRQNLISLGKRKEALKS

SEQ ID NO: 111 - protein, 214 aa, Homo sapiens
MGEEVIPLRVLSKSEWMDLKKEYLALQKASMASLKKTISQIKSESEMETDSGVPQNTGMKNEKTANREECRTQEKVNATGPQFVSGVIVKIISTEPLPGRKQVRDTLAAISEVLYVDLLEGDTECHARFKTPEDAQAVINAYTEINKEHCWKLEILSGDHEQRYWQKILVDRQAKLNQPREKKRGTEKLITKAEKIRLAKTQQASKHIRFSEYD

SEQ ID NO: 112 - protein, 708 aa, Homo sapiens [sequence omitted]

SEQ ID NO: 113 - protein, 1688 aa, Homo sapiens
MTQSTVPLNLIRVHLMVAVEGHLFQKSFQASPNLAYTFIWDKTDAYGQRVYGLSDAVVSVGFEYETCPSLILWEKRTALLQGFELDPSNLGGWSLDKHHILNVKSGILHKGTGENQFLTQQPAIITSIMGNGRRRSISCPSCNGLAEGNKLLAPVALAVGIDGSLYVGDFNYIRRIFPSRNVTSILELRNKEFKHSNNPAHKYYLAVDPVSGSLYVSDTNSRRIYRVKSLSGTKDLAGNSEVVAGTGEQCLPFDEARCGDGGKAIDATLMSPRGIAVDKNGLMYFVDATMIRKVDQNGIISTLLGSNDLTAVRPLSCDSSMDVAQVRLEWPTDLAVNPMDNSLYVLENNVILRITENHQVSIIAGRPMHCQVPGIDYSLSKLAIHSALESASAIAISHTGVLYITETDEKKINRLRQVTTNGEICLLAGAASDCDCKNDVNCNCYSGDDAYATDAILNSPSSLAVAPDGTIYIADLGNIRIRAVSKNKPVLNAFNQYEAASPGEQELYVFNADGIHQYTVSLVTGEYLYNFTYSTDNDVTELIDNNGNSLKIRRDSSGMPRHLLMPDNQIITLTVGTNGGLKVVSTQNLELGLMTYDGNTGLLATKSDETGWTTFYDYDHEGRLTNVTRPTGVVTSLHREMEKSITIDIENSNRDDDVTVITNLSSVEASYTVVQDQVRNSYQLCNNGTLRVMYANGMGISFHSEPHVLAGTITPTIGRCNISLPMENGLNSIEWRLRKEQIKGKVTIFGRKLRVHGRNLLSIDYDRNIRTEKIYDDHRKFTLRIIYDQVGRPFLWLPSSGLAAVNVSYFFNGRLAGLQRGAMSERTDIDKQGRIVSRMFADGKVWSYSYLDKSMVLLLQSQRQYIFEYDSSDRLLAVTMPSVARHSMSTHTSIGYIRNIYNPPESNASVIFDYSDDGRILKTSFLGTGRQVFYKYGKLSKLSEIVYDSTAVTFGYDETTGVLKMVNLQSGGFSCTIRYRKIGPLVDKQIYRFSEEGMVNARFDYTYHDNSFRIASIKPVISETPLPVDLYRYDEISGKVEHFGKFGVIYYDINQIITTAVMTLSKHFDTHGRIKEVQYEMFRSLMYWMTVQYDSMGRVIKRELKLGPYANTTKYTYDYDGDGQLQSVAVNDRPTWRYSYDLNGNLHLLNPGNSVRLMPLRYDLRDRITRLGDVQYKIDDDGYLCQRGSDIFEYNSKGLLTRAYNKASGWSVQYRYDGVGRRASYKTNLGHHLQYFYSDLHNPTRITHVYNHSNSEITSLYYDLQGHLFAMESSSGEEYYVASDNTGTPLAVFSINGLMIKQLQYTAYGEIYYDSNPDFQMVIGFHGGLYDPLTKLVHFTQRDYDVLAGRWTSPDYTMWKNVGKEPAPFNLYMFKSNNPLSSELDLKNYVTDVKSWLVMFGFQLSNIIPGFPRAKMYFVPPPYELSESQASENGQLITGVQQTTERHNQAFMALEGQVITKKLHASIREKAGHWFATTTPIIGKGIMFAIKEGRVTTGVSSIASEDSRKVASVLNNAYYLDKMHYSIEGKDTHYFVKIGSADGDLVTLGTTIGRKVLESGVNVTVSQPTLLVNGRTRRFTNIEFQYSTLLLSIRYGLTPDTLDEEKARVLDQARQRALGTAWAKEQQKARDGREGSRLWTEGEKQQLLSTGRVQGYEGYYVLPVEQYPELADSSSNIQFLRQNEMGKR

SEQ ID NO: 114 - protein, 1871 aa, Homo sapiens
MANLEESFPRGGTRKIHKPEKAFQQSVEQDNLFDISTEEGSTKRKKSQKGPAKTKKLKIEKRESSKSAREKFEILSVESLCEGMRILGCVKEVNELELVISLPNGLQGFVQVTEICDAYTKKLNEQVTQEQPLKDLLHLPELFSPGMLVRCVVSSLGITDRGKKSVKLSLNPKNVNRVLSAEALKPGMLLTGTVSSLEDHGYLVDIGVDGTRAFLPLLKAQEYIRQKNKGAKLKVGQYLNCIVEKVKGNGGVVSLSVGHSEVSTAIATEQQSWNLNNLLPGLVVKAQVQKVTPFGLTLNFLTFFTGVVDFMHLDPKKAGTYFSNQAVRACILCVHPRTRVVHLSLRPIFLQPGRPLTRLSCQNLGAVLDDVPVQGFFKKAGATFRLKDGVLAYARLSHLSDSKNVFNPEAFKPGNTHKCRIIDYSQMDELALLSLRTSIIEAQYLRYHDIEPGAVVKGTVLTIKSYGMLVKVGEQMRGLVPPMHLADILMKNPEKKYHIGDEVKCRVLLCDPEAKKLMMTLKKTLIESKLPVITCYADAKPGLQTHGFIIRVKDYGCIVKFYNNVQGLVPKHELSTEYIPDPERVFYTGQVVKVVVLNCEPSKERMLLSFKLSSDPEPKKEPAGHSQKKGKAINIGQLVDVKVLEKTKDGLEVAVLPHNIRAFLPTSHLSDHVANGPLLHHWLQAGDILHRVLCLSQSEGRVLLCRKPALVSTVEGGQDPKNFSEIHPGMLLIGFVKSIKDYGVFIQFPSGLSGLAPKAIMSDKFVTSTSDHFVEGQTVAAKVTNVDEEKQRMLLSLRLSDCGLGDLAITSLLLLNQCLEELQGVRSLMSNRDSVLIQTLAEMTPGMFLDLVVQEVLEDGSVVFSGGPVPDLVLKASRYHRAGQEVESGQKKKVVILNVDLLKLEVHVSLHQDLVNRKARKLRKGSEHQAIVQHLEKSFAIASLVETGHLAAFSLTSHLNDTFRFDSEKLQVGQGVSLTLKTTEPGVTGLLLAVEGPAAKRTMRPTQKDSETVDEDEEVDPALTVGTIKKHTLSIGDMVTGTVKSIKPTHVVVTLEDGIIGCIHASHILDDVPEGTSPTTKLKVGKTVTARVIGGRDMKTFKYLPISHPRFVRTIPELSVRPSELEDGHTALNTHSVSPMEKIKQYQAGQTVTCFLKKYNVVKKWLEVEIAPDIRGRIPLLLTSLSFKVLKHPDKKFRVGQALRATVVGPDSSKTLLCLSLTGPHKLEEGEVAMGRVVKVTPNEGLTVSFPFGKIGTVSIFHMSDSYSETPLEDFVPQKVVRCYILSTADNVLTLSLRSSRTNPETKSKVEDPEINSIQDIKEGQLLRGYVGSIQPHGVFFRLGPSVVGLARYSHVSQHSPSKKALYNKHLPEGKLLTARVLRLNHQKNLVELSFLPGDTGKPDVLSASLEGQLTKQEERKTEAEERDQKGEKKNQKRNEKKNQKGQEEVEMPSKEKQQPQKPQAQKRGGRECRESGSEQERVSKKPKKAGLSEEDDSLVDVYYREGKEEAEETNVLPKEKQTKPAEAPRLQLSSGFAWNVGLDSLTPALPPLAESSDSEEDEKPHQATIKKSKKERELEKQKAEKELSRIEEALMDPGRQPESADDFDRLVLSSPNSSILWLQYMAFHLQATEIEKARAVAERALKTISFREEQEKLNVWVALLNLENMYGSQESLTKVFERAVQYNEPLKVFLHLADIYAKSEKFQEAGELYNRMLKRFRQEKAVWIKYGAFLLRRSQAAASHRVLQRALECLPSKEHVDVIAKFAQLEFQLGDAERAKAIFENTLSTYPKRTDVWSVYIDMTIKHGSQKDVRDIFERVIHLSLAPKRMKFFFKRYLDYEKQHGTEKDVQAVKAKALEYVEAKSSVLED
